United States Patent Application Publication US 2005/0266409 A1 - sequence listing, part 2

SEQ ID NO: 38137 - RNA, 21 nt, RNAi
uuaguuguucuacuuugaccg

SEQ ID NO: 38138 - DNA, 21 bp, Homo sapiens
cagcagtatgtcatgaccagc

SEQ ID NO: 38139 - RNA, 21 nt, RNAi
gcaguaugucaugaccagcuu

SEQ ID NO: 38140 - RNA, 21 nt, RNAi
uucgucauacaguacuggucg

SEQ ID NO: 38141 - DNA, 21 bp, Homo sapiens
cagtatgtcatgaccagcctc

SEQ ID NO: 38142 - RNA, 21 nt, RNAi
guaugucaugaccagccucuu

SEQ ID NO: 38143 - RNA, 21 nt, RNAi
uucauacaguacuggucggag

SEQ ID NO: 38144 - DNA, 21 bp, Homo sapiens
catgaccagcctccagcaaga

SEQ ID NO: 38145 - RNA, 21 nt, RNAi
ugaccagccuccagcaagauu

SEQ ID NO: 38146 - RNA, 21 nt, RNAi
uuacuggucggaggucguucu

SEQ ID NO: 38147 - DNA, 21 bp, Homo sapiens
cagcctccagcaagagtacaa

SEQ ID NO: 38148 - RNA, 21 nt, RNAi
gccuccagcaagaguacaauu

SEQ ID NO: 38149 - RNA, 21 nt, RNAi
uucggaggucguucucauguu

SEQ ID NO: 38150 - DNA, 21 bp, Homo sapiens
caaatgctgactgccgctcac

SEQ ID NO: 38151 - RNA, 21 nt, RNAi
aaugcugacugccgcucacuu

SEQ ID NO: 38152 - RNA, 21 nt, RNAi
uuuuacgacugacggcgagug

SEQ ID NO: 38153 - DNA, 21 bp, Homo sapiens
cattgaccaagcaagactgaa

SEQ ID NO: 38154 - RNA, 21 nt, RNAi
uugaccaagcaagacugaauu

SEQ ID NO: 38155 - RNA, 21 nt, RNAi
uuaacugguucguucugacuu

SEQ ID NO: 38156 - DNA, 21 bp, Homo sapiens
cagacgagaccacactgagcc

SEQ ID NO: 38157 - RNA, 21 nt, RNAi
gacgagaccacacugagccuu

SEQ ID NO: 38158 - RNA, 21 nt, RNAi
uucugcucuggugugacucgg

SEQ ID NO: 38159 - DNA, 21 bp, Homo sapiens
caccagcagcgaggaattaac

SEQ ID NO: 38160 - RNA, 21 nt, RNAi
ccagcagcgaggaauuaacuu

SEQ ID NO: 38161 - RNA, 21 nt, RNAi
uuggucgucgcuccuuaauug

SEQ ID NO: 38162 - DNA, 21 bp, Homo sapiens
cagtcgccagcactcacagct

SEQ ID NO: 38163 - RNA, 21 nt, RNAi
gucgccagcacucacagcuuu

SEQ ID NO: 38164 - RNA, 21 nt, RNAi
uucagcggucgugagugucga

SEQ ID NO: 38165 - DNA, 21 bp, Homo sapiens
cagcactcacagctccaactt

SEQ ID NO: 38166 - RNA, 21 nt, RNAi
gcacucacagcuccaacuuuu

SEQ ID NO: 38167 - RNA, 21 nt, RNAi
uucgugagugucgagguugaa

SEQ ID NO: 38168 - DNA, 21 bp, Homo sapiens
cattaagatacgttctaaagg

SEQ ID NO: 38169 - RNA, 21 nt, RNAi
uuaagauacguucuaaagguu

SEQ ID NO: 38170 - RNA, 21 nt, RNAi
uuaauucuaugcaagauuucc

SEQ ID NO: 38171 - DNA, 21 bp, Homo sapiens
catcttaattcctaaactacc

SEQ ID NO: 38172 - RNA, 21 nt, RNAi
ucuuaauuccuaaacuaccuu

SEQ ID NO: 38173 - RNA, 21 nt, RNAi
uuagaauuaaggauuugaugg

SEQ ID NO: 38174 - DNA, 21 bp, Homo sapiens
catagtggaagaggagagccg

SEQ ID NO: 38175 - RNA, 21 nt, RNAi
uaguggaagaggagagccguu

SEQ ID NO: 38176 - RNA, 21 nt, RNAi
uuaucaccuucuccucucggc

SEQ ID NO: 38177 - DNA, 21 bp, Homo sapiens
gaaggccatgagtgattactg

SEQ ID NO: 38178 - RNA, 21 nt, RNAi
aggccaugagugauuacuguu

SEQ ID NO: 38179 - RNA, 21 nt, RNAi
uuuccgguacucacuaaugac

SEQ ID NO: 38180 - DNA, 21 bp, Homo sapiens
gaaagaagtctaactatgaag

SEQ ID NO: 38181 - RNA, 21 nt, RNAi
aagaagucuaacuaugaaguu

SEQ ID NO: 38182 - RNA, 21 nt, RNAi
uuuucuucagauugauacuuc

SEQ ID NO: 38183 - DNA, 21 bp, Homo sapiens
gatgttggtttaaagcgattt

SEQ ID NO: 38184 - RNA, 21 nt, RNAi
uguugguuuaaagcgauuuuu

SEQ ID NO: 38185 - RNA, 21 nt, RNAi
uuacaaccaaauuucgcuaaa

SEQ ID NO: 38186 - DNA, 21 bp, Homo sapiens
gagtttactggattctgtcaa

SEQ ID NO: 38187 - RNA, 21 nt, RNAi
guuuacuggauucugucaauu

SEQ ID NO: 38188 - RNA, 21 nt, RNAi
uucaaaugaccuaagacaguu

SEQ ID NO: 38189 - DNA, 21 bp, Homo sapiens
gatccaacaaacatttagaca

SEQ ID NO: 38190 - RNA, 21 nt, RNAi
uccaacaaacauuuagacauu

SEQ ID NO: 38191 - RNA, 21 nt, RNAi
uuagguuguuuguaaaucugu

SEQ ID NO: 38192 - DNA, 21 bp, Homo sapiens
gacaatttgccaaccttaata

SEQ ID NO: 38193 - RNA, 21 nt, RNAi
caauuugccaaccuuaauauu

SEQ ID NO: 38194 - RNA, 21 nt, RNAi
uuguuaaacgguuggaauuau

SEQ ID NO: 38195 - DNA, 21 bp, Homo sapiens
gaaattctttgagatcctgtc

SEQ ID NO: 38196 - RNA, 21 nt, RNAi
aauucuuugagauccugucuu

SEQ ID NO: 38197 - RNA, 21 nt, RNAi
uuuuaagaaacucuaggacag

SEQ ID NO: 38198 - DNA, 21 bp, Homo sapiens
gagatcctgtctccagtctac

SEQ ID NO: 38199 - RNA, 21 nt, RNAi
gauccugucuccagucuacuu

SEQ ID NO: 38200 - RNA, 21 nt, RNAi
uucuaggacagaggucagaug

SEQ ID NO: 38201 - DNA, 21 bp, Homo sapiens
gatcctgtctccagtctacag

SEQ ID NO: 38202 - RNA, 21 nt, RNAi
uccugucuccagucuacaguu

SEQ ID NO: 38203 - RNA, 21 nt, RNAi
uuaggacagaggucagauguc

SEQ ID NO: 38204 - DNA, 21 bp, Homo sapiens
gatttgataaggaatgcttca

SEQ ID NO: 38205 - RNA, 21 nt, RNAi
uuugauaaggaaugcuucauu

SEQ ID NO: 38206 - RNA, 21 nt, RNAi
uuaaacuauuccuuacgaagu

SEQ ID NO: 38207 - DNA, 21 bp, Homo sapiens
gataaggaatgcttcaagtgt

SEQ ID NO: 38208 - RNA, 21 nt, RNAi
uaaggaaugcuucaaguguuu

SEQ ID NO: 38209 - RNA, 21 nt, RNAi
uuauuccuuacgaaguucaca

SEQ ID NO: 38210 - DNA, 21 bp, Homo sapiens
gaatgcttcaagtgtgctctt

SEQ ID NO: 38211 - RNA, 21 nt, RNAi
augcuucaagugugcucuuuu

SEQ ID NO: 38212 - RNA, 21 nt, RNAi
uuuacgaaguucacacgagaa

SEQ ID NO: 38213 - DNA, 21 bp, Homo sapiens
gattatttcagtggaactggc

SEQ ID NO: 38214 - RNA, 21 nt, RNAi
uuauuucaguggaacuggcuu

SEQ ID NO: 38215 - RNA, 21 nt, RNAi
uuaauaaagucaccuugaccg

SEQ ID NO: 38216 - DNA, 21 bp, Homo sapiens
gaagaaggaatcagttaccta

SEQ ID NO: 38217 - RNA, 21 nt, RNAi
agaaggaaucaguuaccuauu

SEQ ID NO: 38218 - RNA, 21 nt, RNAi
uuucuuccuuagucaauggau

SEQ ID NO: 38219 - DNA, 21 bp, Homo sapiens
gaaggaatcagttacctaacg

SEQ ID NO: 38220 - RNA, 21 nt, RNAi
aggaaucaguuaccuaacguu

SEQ ID NO: 38221 - RNA, 21 nt, RNAi
uuuccuuagucaauggauugc

SEQ ID NO: 38222 - DNA, 21 bp, Homo sapiens
gaatcagttacctaacggaca

SEQ ID NO: 38223 - RNA, 21 nt, RNAi
aucaguuaccuaacggacauu

SEQ ID NO: 38224 - RNA, 21 nt, RNAi
uuuagucaauggauugccugu

SEQ ID NO: 38225 - DNA, 21 bp, Homo sapiens
gacttcactcaagtgcaaacc

SEQ ID NO: 38226 - RNA, 21 nt, RNAi
cuucacucaagugcaaaccuu

SEQ ID NO: 38227 - RNA, 21 nt, RNAi
uugaagugaguucacguuugg

SEQ ID NO: 38228 - DNA, 21 bp, Homo sapiens
gagcctctgacagtgacggca

SEQ ID NO: 38229 - RNA, 21 nt, RNAi
gccucugacagugacggcauu

SEQ ID NO: 38230 - RNA, 21 nt, RNAi
uucggagacugucacugccgu

SEQ ID NO: 38231 - DNA, 21 bp, Homo sapiens
gagaatatggctgacctaata

SEQ ID NO: 38232 - RNA, 21 nt, RNAi
gaauauggcugaccuaauauu

SEQ ID NO: 38233 - RNA, 21 nt, RNAi
uucuuauaccgacuggauuau

SEQ ID NO: 38234 - DNA, 21 bp, Homo sapiens
gaatatggctgacctaataga

SEQ ID NO: 38235 - RNA, 21 nt, RNAi
auauggcugaccuaauagauu

SEQ ID NO: 38236 - RNA, 21 nt, RNAi
uuuauaccgacuggauuaucu

SEQ ID NO: 38237 - DNA, 21 bp, Homo sapiens
gaatggaacctcgcagtcatt

SEQ ID NO: 38238 - RNA, 21 nt, RNAi
auggaaccucgcagucauuuu

SEQ ID NO: 38239 - RNA, 21 nt, RNAi
uuuaccuuggagcgucaguaa

SEQ ID NO: 38240 - DNA, 21 bp, Homo sapiens
gaacctcgcagtcatttatca

SEQ ID NO: 38241 - RNA, 21 nt, RNAi
accucgcagucauuuaucauu

SEQ ID NO: 38242 - RNA, 21 nt, RNAi
uuuggagcgucaguaaauagu

SEQ ID NO: 38243 - DNA, 21 bp, Homo sapiens
gacctcagaaagaaggtgaac

SEQ ID NO: 38244 - RNA, 21 nt, RNAi
ccucagaaagaaggugaacuu

SEQ ID NO: 38245 - RNA, 21 nt, RNAi
uuggagucuuucuuccacuug

SEQ ID NO: 38246 - DNA, 21 bp, Homo sapiens
gacacacgccgtctctgtgtc

SEQ ID NO: 38247 - RNA, 21 nt, RNAi
cacacgccgucucugugucuu

SEQ ID NO: 38248 - RNA, 21 nt, RNAi
uugugugcggcagagacacag

SEQ ID NO: 38249 - DNA, 21 bp, Homo sapiens
gaaacagatgattatgctgag

SEQ ID NO: 38250 - RNA, 21 nt, RNAi
aacagaugauuaugcugaguu

SEQ ID NO: 38251 - RNA, 21 nt, RNAi
uuuugucuacuaauacgacuc

SEQ ID NO: 38252 - DNA, 21 bp, Homo sapiens
gatgaagaagatacttacacc

SEQ ID NO: 38253 - RNA, 21 nt, RNAi
ugaagaagauacuuacaccuu

SEQ ID NO: 38254 - RNA, 21 nt, RNAi
uuacuucuucuaugaaugugg

SEQ ID NO: 38255 - DNA, 21 bp, Homo sapiens
gaagaagatacttacaccatg

SEQ ID NO: 38256 - RNA, 21 nt, RNAi
agaagauacuuacaccauguu

SEQ ID NO: 38257 - RNA, 21 nt, RNAi
uuucuucuaugaaugugguac

SEQ ID NO: 38258 - DNA, 21 bp, Homo sapiens
gagaaagaatagaacttggac

SEQ ID NO: 38259 - RNA, 21 nt, RNAi
gaaagaauagaacuuggacuu

SEQ ID NO: 38260 - RNA, 21 nt, RNAi
uucuuucuuaucuugaaccug

SEQ ID NO: 38261 - DNA, 21 bp, Homo sapiens
gaaagaatagaacttggacga

SEQ ID NO: 38262 - RNA, 21 nt, RNAi
aagaauagaacuuggacgauu

SEQ ID NO: 38263 - RNA, 21 nt, RNAi
uuuucuuaucuugaaccugcu

SEQ ID NO: 38264 - DNA, 21 bp, Homo sapiens
gaatagaacttggacgatgta

SEQ ID NO: 38265 - RNA, 21 nt, RNAi
auagaacuuggacgauguauu

SEQ ID NO: 38266 - RNA, 21 nt, RNAi
uuuaucuugaaccugcuacau

SEQ ID NO: 38267 - DNA, 21 bp, Homo sapiens
gaacttggacgatgtattgga

SEQ ID NO: 38268 - RNA, 21 nt, RNAi
acuuggacgauguauuggauu

SEQ ID NO: 38269 - RNA, 21 nt, RNAi
uuugaaccugcuacauaaccu

SEQ ID NO: 38270 - DNA, 21 bp, Homo sapiens
gacgatgtattggagaaggcc

SEQ ID NO: 38271 - RNA, 21 nt, RNAi
cgauguauuggagaaggccuu

SEQ ID NO: 38272 - RNA, 21 nt, RNAi
uugcuacauaaccucuuccgg

SEQ ID NO: 38273 - DNA, 21 bp, Homo sapiens
gatgtattggagaaggccaat

SEQ ID NO: 38274 - RNA, 21 nt, RNAi
uguauuggagaaggccaauuu

SEQ ID NO: 38275 - RNA, 21 nt, RNAi
uuacauaaccucuuccgguua

SEQ ID NO: 38276 - DNA, 21 bp, Homo sapiens
gagaaggccaatttggagatg

SEQ ID NO: 38277 - RNA, 21 nt, RNAi
gaaggccaauuuggagauguu

SEQ ID NO: 38278 - RNA, 21 nt, RNAi
uucuuccgguuaaaccucuac

SEQ ID NO: 38279 - DNA, 21 bp, Homo sapiens
gaaggccaatttggagatgta

SEQ ID NO: 38280 - RNA, 21 nt, RNAi
aggccaauuuggagauguauu

SEQ ID NO: 38281 - RNA, 21 nt, RNAi
uuuccgguuaaaccucuacau

SEQ ID NO: 38282 - DNA, 21 bp, Homo sapiens
gagatgtacatcaaggcattt

SEQ ID NO: 38283 - RNA, 21 nt, RNAi
gauguacaucaaggcauuuuu

SEQ ID NO: 38284 - RNA, 21 nt, RNAi
uucuacauguaguuccguaaa

SEQ ID NO: 38285 - DNA, 21 bp, Homo sapiens
gatgtacatcaaggcatttat

SEQ ID NO: 38286 - RNA, 21 nt, RNAi
uguacaucaaggcauuuauuu

SEQ ID NO: 38287 - RNA, 21 nt, RNAi
uuacauguaguuccguaaaua

SEQ ID NO: 38288 - DNA, 21 bp, Homo sapiens
gagtccagagaatccagcttt

SEQ ID NO: 38289 - RNA, 21 nt, RNAi
guccagagaauccagcuuuuu

SEQ ID NO: 38290 - RNA, 21 nt, RNAi
uucaggucucuuaggucgaaa

SEQ ID NO: 38291 - DNA, 21 bp, Homo sapiens
gagaatccagctttggcggtt

SEQ ID NO: 38292 - RNA, 21 nt, RNAi
gaauccagcuuuggcgguuuu

SEQ ID NO: 38293 - RNA, 21 nt, RNAi
uucuuaggucgaaaccgccaa

SEQ ID NO: 38294 - DNA, 21 bp, Homo sapiens
gaatccagctttggcggttgc

SEQ ID NO: 38295 - RNA, 21 nt, RNAi
auccagcuuuggcgguugcuu

SEQ ID NO: 38296 - RNA, 21 nt, RNAi
uuuaggucgaaaccgccaacg

SEQ ID NO: 38297 - DNA, 21 bp, Homo sapiens
gacagcgtgagagagaaattt

SEQ ID NO: 38298 - RNA, 21 nt, RNAi
cagcgugagagagaaauuuuu

SEQ ID NO: 38299 - RNA, 21 nt, RNAi
uugucgcacucucucuuuaaa

SEQ ID NO: 38300 - DNA, 21 bp, Homo sapiens
gagagagaaatttcttcaaga

SEQ ID NO: 38301 - RNA, 21 nt, RNAi
gagagaaauuucuucaagauu

SEQ ID NO: 38302 - RNA, 21 nt, RNAi
uucucucuuuaaagaaguucu

SEQ ID NO: 38303 - DNA, 21 bp, Homo sapiens
gagagaaatttcttcaagaag

SEQ ID NO: 38304 - RNA, 21 nt, RNAi
gagaaauuucuucaagaaguu

SEQ ID NO: 38305 - RNA, 21 nt, RNAi
uucucuuuaaagaaguucuuc

SEQ ID NO: 38306 - DNA, 21 bp, Homo sapiens
gagaaatttcttcaagaagcc

SEQ ID NO: 38307 - RNA, 21 nt, RNAi
gaaauuucuucaagaagccuu

SEQ ID NO: 38308 - RNA, 21 nt, RNAi
uucuuuaaagaaguucuucgg

SEQ ID NO: 38309 - DNA, 21 bp, Homo sapiens
gaaatttcttcaagaagcctg

SEQ ID NO: 38310 - RNA, 21 nt, RNAi
aauuucuucaagaagccuguu

SEQ ID NO: 38311 - RNA, 21 nt, RNAi
uuuuaaagaaguucuucggac

SEQ ID NO: 38312 - DNA, 21 bp, Homo sapiens
gaagcctgccattacacatct

SEQ ID NO: 38313 - RNA, 21 nt, RNAi
agccugccauuacacaucuuu

SEQ ID NO: 38314 - RNA, 21 nt, RNAi
uuucggacgguaauguguaga

SEQ ID NO: 38315 - DNA, 21 bp, Homo sapiens
gaattggtgcagatatataag

SEQ ID NO: 38316 - RNA, 21 nt, RNAi
auuggugcagauauauaaguu

SEQ ID NO: 38317 - RNA, 21 nt, RNAi
uuuaaccacgucuauauauuc

SEQ ID NO: 38318 - DNA, 21 bp, Homo sapiens
gatcctaatgttgatgcctgc

SEQ ID NO: 38319 - RNA, 21 nt, RNAi
uccuaauguugaugccugcuu

SEQ ID NO: 38320 - RNA, 21 nt, RNAi
uuaggauuacaacuacggacg

SEQ ID NO: 38321 - DNA, 21 bp, Homo sapiens
gaatgcagagttaacaatgcg

SEQ ID NO: 38322 - RNA, 21 nt, RNAi
augcagaguuaacaaugcguu

SEQ ID NO: 38323 - RNA, 21 nt, RNAi
uuuacgucucaauuguuacgc

SEQ ID NO: 38324 - DNA, 21 bp, Homo sapiens
gagttaacaatgcgtcagttt

SEQ ID NO: 38325 - RNA, 21 nt, RNAi
guuaacaaugcgucaguuuuu

SEQ ID NO: 38326 - RNA, 21 nt, RNAi
uucaauuguuacgcagucaaa

SEQ ID NO: 38327 - DNA, 21 bp, Homo sapiens
gaccatcctcatattgtgaag

SEQ ID NO: 38328 - RNA, 21 nt, RNAi
ccauccucauauugugaaguu

SEQ ID NO: 38329 - RNA, 21 nt, RNAi
uugguaggaguauaacacuuc

SEQ ID NO: 38330 - DNA, 21 bp, Homo sapiens
gaagctgattggagtcatcac

SEQ ID NO: 38331 - RNA, 21 nt, RNAi
agcugauuggagucaucacuu

SEQ ID NO: 38332 - RNA, 21 nt, RNAi
uuucgacuaaccucaguagug

SEQ ID NO: 38333 - DNA, 21 bp, Homo sapiens
gattggagtcatcacagagaa

SEQ ID NO: 38334 - RNA, 21 nt, RNAi
uuggagucaucacagagaauu

SEQ ID NO: 38335 - RNA, 21 nt, RNAi
uuaaccucaguagugucucuu

SEQ ID NO: 38336 - DNA, 21 bp, Homo sapiens
gagtcatcacagagaatcctg

SEQ ID NO: 38337 - RNA, 21 nt, RNAi
gucaucacagagaauccuguu

SEQ ID NO: 38338 - RNA, 21 nt, RNAi
uucaguagugucucuuaggac

SEQ ID NO: 38339 - DNA, 21 bp, Homo sapiens
gagaatcctgtctggataatc

SEQ ID NO: 38340 - RNA, 21 nt, RNAi
gaauccugucuggauaaucuu

SEQ ID NO: 38341 - RNA, 21 nt, RNAi
uucuuaggacagaccuauuag

SEQ ID NO: 38342 - DNA, 21 bp, Homo sapiens
gaatcctgtctggataatcat

SEQ ID NO: 38343 - RNA, 21 nt, RNAi
auccugucuggauaaucauuu

SEQ ID NO: 38344 - RNA, 21 nt, RNAi
uuuaggacagaccuauuagua

SEQ ID NO: 38345 - DNA, 21 bp, Homo sapiens
gataatcatggagctgtgcac

SEQ ID NO: 38346 - RNA, 21 nt, RNAi
uaaucauggagcugugcacuu

SEQ ID NO: 38347 - RNA, 21 nt, RNAi
uuauuaguaccucgacacgug

SEQ ID NO: 38348 - DNA, 21 bp, Homo sapiens
gagctgtgcacacttggagag

SEQ ID NO: 38349 - RNA, 21 nt, RNAi
gcugugcacacuuggagaguu

SEQ ID NO: 38350 - RNA, 21 nt, RNAi
uucgacacgugugaaccucuc

SEQ ID NO: 38351 - DNA, 21 bp, Homo sapiens
gaaatacagtttggatctagc

SEQ ID NO: 38352 - RNA, 21 nt, RNAi
aauacaguuuggaucuagcuu

SEQ ID NO: 38353 - RNA, 21 nt, RNAi
uuuuaugucaaaccuagaucg

SEQ ID NO: 38354 - DNA, 21 bp, Homo sapiens
gatctagcatctttgatcctg

SEQ ID NO: 38355 - RNA, 21 nt, RNAi
ucuagcaucuuugauccuguu

SEQ ID NO: 38356 - RNA, 21 nt, RNAi
uuagaucguagaaacuaggac

SEQ ID NO: 38357 - DNA, 21 bp, Homo sapiens
gatcctgtatgcctatcagct

SEQ ID NO: 38358 - RNA, 21 nt, RNAi
uccuguaugccuaucagcuuu

SEQ ID NO: 38359 - RNA, 21 nt, RNAi
uuaggacauacggauagucga

SEQ ID NO: 38360 - DNA, 21 bp, Homo sapiens
gacattgctgctcggaatgtt

SEQ ID NO: 38361 - RNA, 21 nt, RNAi
cauugcugcucggaauguuuu

SEQ ID NO: 38362 - RNA, 21 nt, RNAi
uuguaacgacgagccuuacaa

SEQ ID NO: 38363 - DNA, 21 bp, Homo sapiens
gaatgttctggtgtcctcaaa

SEQ ID NO: 38364 - RNA, 21 nt, RNAi
auguucugguguccucaaauu

SEQ ID NO: 38365 - RNA, 21 nt, RNAi
uuuacaagaccacaggaguuu

SEQ ID NO: 38366 - DNA, 21 bp, Homo sapiens
gatagtacttactacaaagct

SEQ ID NO: 38367 - RNA, 21 nt, RNAi
uaguacuuacuacaaagcuuu

SEQ ID NO: 38368 - RNA, 21 nt, RNAi
uuaucaugaaugauguuucga

SEQ ID NO: 38369 - DNA, 21 bp, Homo sapiens
gatggctccagagtcaatcaa

SEQ ID NO: 38370 - RNA, 21 nt, RNAi
uggcuccagagucaaucaauu

SEQ ID NO: 38371 - RNA, 21 nt, RNAi
uuaccgaggucucaguuaguu

SEQ ID NO: 38372 - DNA, 21 bp, Homo sapiens
gacgtatggatgtttggtgtg

SEQ ID NO: 38373 - RNA, 21 nt, RNAi
cguauggauguuugguguguu

SEQ ID NO: 38374 - RNA, 21 nt, RNAi
uugcauaccuacaaaccacac

SEQ ID NO: 38375 - DNA, 21 bp, Homo sapiens
gatgtttggtgtgtgtatgtg

SEQ ID NO: 38376 - RNA, 21 nt, RNAi
uguuugguguguguauguguu

SEQ ID NO: 38377 - RNA, 21 nt, RNAi
uuacaaaccacacacauacac

SEQ ID NO: 38378 - DNA, 21 bp, Homo sapiens
gagatactgatgcatggtgtg

SEQ ID NO: 38379 - RNA, 21 nt, RNAi
gauacugaugcaugguguguu

SEQ ID NO: 38380 - RNA, 21 nt, RNAi
uucuaugacuacguaccacac

SEQ ID NO: 38381 - DNA, 21 bp, Homo sapiens
gatactgatgcatggtgtgaa

SEQ ID NO: 38382 - RNA, 21 nt, RNAi
uacugaugcauggugugaauu

SEQ ID NO: 38383 - RNA, 21 nt, RNAi
uuaugacuacguaccacacuu

SEQ ID NO: 38384 - DNA, 21 bp, Homo sapiens
gatgcatggtgtgaagccttt

SEQ ID NO: 38385 - RNA, 21 nt, RNAi
ugcauggugugaagccuuuuu

SEQ ID NO: 38386 - RNA, 21 nt, RNAi
uuacguaccacacuucggaaa

SEQ ID NO: 38387 - DNA, 21 bp, Homo sapiens
gagtgaagaacaatgatgtaa

SEQ ID NO: 38388 - RNA, 21 nt, RNAi
gugaagaacaaugauguaauu

SEQ ID NO: 38389 - RNA, 21 nt, RNAi
uucacuucuuguuacuacauu

SEQ ID NO: 38390 - DNA, 21 bp, Homo sapiens
gaagaacaatgatgtaatcgg

SEQ ID NO: 38391 - RNA, 21 nt, RNAi
agaacaaugauguaaucgguu

SEQ ID NO: 38392 - RNA, 21 nt, RNAi
uuucuuguuacuacauuagcc

SEQ ID NO: 38393 - DNA, 21 bp, Homo sapiens
gaacaatgatgtaatcggtcg

SEQ ID NO: 38394 - RNA, 21 nt, RNAi
acaaugauguaaucggucguu

SEQ ID NO: 38395 - RNA, 21 nt, RNAi
uuuguuacuacauuagccagc

SEQ ID NO: 38396 - DNA, 21 bp, Homo sapiens
gatgtaatcggtcgaattgaa

SEQ ID NO: 38397 - RNA, 21 nt, RNAi
uguaaucggucgaauugaauu

SEQ ID NO: 38398 - RNA, 21 nt, RNAi
uuacauuagccagcuuaacuu

SEQ ID NO: 38399 - DNA, 21 bp, Homo sapiens
gaaagattaccaatgcctcca

SEQ ID NO: 38400 - RNA, 21 nt, RNAi
aagauuaccaaugccuccauu

SEQ ID NO: 38401 - RNA, 21 nt, RNAi
uuuucuaaugguuacggaggu

SEQ ID NO: 38402 - DNA, 21 bp, Homo sapiens
gattaccaatgcctccaaatt

SEQ ID NO: 38403 - RNA, 21 nt, RNAi
uuaccaaugccuccaaauuuu

SEQ ID NO: 38404 - RNA, 21 nt, RNAi
uuaaugguuacggagguuuaa

SEQ ID NO: 38405 - DNA, 21 bp, Homo sapiens
gaacttaaagctcagctcagc

SEQ ID NO: 38406 - RNA, 21 nt, RNAi
acuuaaagcucagcucagcuu

SEQ ID NO: 38407 - RNA, 21 nt, RNAi
uuugaauuucgagucgagucg

SEQ ID NO: 38408 - DNA, 21 bp, Homo sapiens
gaggaagagaaggctcagcaa

SEQ ID NO: 38409 - RNA, 21 nt, RNAi
ggaagagaaggcucagcaauu

SEQ ID NO: 38410 - RNA, 21 nt, RNAi
uuccuucucuuccgagucguu

SEQ ID NO: 38411 - DNA, 21 bp, Homo sapiens
gaagagaaggctcagcaagaa

SEQ ID NO: 38412 - RNA, 21 nt, RNAi
agagaaggcucagcaagaauu

SEQ ID NO: 38413 - RNA, 21 nt, RNAi
uuucucuuccgagucguucuu

SEQ ID NO: 38414 - DNA, 21 bp, Homo sapiens
gagaaggctcagcaagaagag

SEQ ID NO: 38415 - RNA, 21 nt, RNAi
gaaggcucagcaagaagaguu

SEQ ID NO: 38416 - RNA, 21 nt, RNAi
uucuuccgagucguucuucuc

SEQ ID NO: 38417 - DNA, 21 bp, Homo sapiens
gaaggctcagcaagaagagcg

SEQ ID NO: 38418 - RNA, 21 nt, RNAi
aggcucagcaagaagagcguu

SEQ ID NO: 38419 - RNA, 21 nt, RNAi
uuuccgagucguucuucucgc

SEQ ID NO: 38420 - DNA, 21 bp, Homo sapiens
gaagagcgcatgaggatggag

SEQ ID NO: 38421 - RNA, 21 nt, RNAi
agagcgcaugaggauggaguu

SEQ ID NO: 38422 - RNA, 21 nt, RNAi
uuucucgcguacuccuaccuc

SEQ ID NO: 38423 - DNA, 21 bp, Homo sapiens
gagcgcatgaggatggagtcc

SEQ ID NO: 38424 - RNA, 21 nt, RNAi
gcgcaugaggauggaguccuu

SEQ ID NO: 38425 - RNA, 21 nt, RNAi
uucgcguacuccuaccucagg

SEQ ID NO: 38426 - DNA, 21 bp, Homo sapiens
gaggatggagtccagaagaca

SEQ ID NO: 38427 - RNA, 21 nt, RNAi
ggauggaguccagaagacauu

SEQ ID NO: 38428 - RNA, 21 nt, RNAi
uuccuaccucaggucuucugu

SEQ ID NO: 38429 - DNA, 21 bp, Homo sapiens
gatggagtccagaagacaggc

SEQ ID NO: 38430 - RNA, 21 nt, RNAi
uggaguccagaagacaggcuu

SEQ ID NO: 38431 - RNA, 21 nt, RNAi
uuaccucaggucuucuguccg

SEQ ID NO: 38432 - DNA, 21 bp, Homo sapiens
gagtccagaagacaggccaca

SEQ ID NO: 38433 - RNA, 21 nt, RNAi
guccagaagacaggccacauu

SEQ ID NO: 38434 - RNA, 21 nt, RNAi
uucaggucuucuguccggugu

SEQ ID NO: 38435 - DNA, 21 bp, Homo sapiens
gaagacaggccacagtgtcct

SEQ ID NO: 38436 - RNA, 21 nt, RNAi
agacaggccacaguguccuuu

SEQ ID NO: 38437 - RNA, 21 nt, RNAi
uuucuguccggugucacagga

SEQ ID NO: 38438 - DNA, 21 bp, Homo sapiens
gaatcacagccatggctggca

SEQ ID NO: 38439 - RNA, 21 nt, RNAi
aucacagccauggcuggcauu

SEQ ID NO: 38440 - RNA, 21 nt, RNAi
uuuagugucgguaccgaccgu

SEQ ID NO: 38441 - DNA, 21 bp, Homo sapiens
gaccaaacagattcatggaat

SEQ ID NO: 38442 - RNA, 21 nt, RNAi
ccaaacagauucauggaauuu

SEQ ID NO: 38443 - RNA, 21 nt, RNAi
uugguuugucuaaguaccuua

SEQ ID NO: 38444 - DNA, 21 bp, Homo sapiens
gattcatggaatcatagatct

SEQ ID NO: 38445 - RNA, 21 nt, RNAi
uucauggaaucauagaucuuu

SEQ ID NO: 38446 - RNA, 21 nt, RNAi
uuaaguaccuuaguaucuaga

SEQ ID NO: 38447 - DNA, 21 bp, Homo sapiens
gaatcatagatctcaggagat

SEQ ID NO: 38448 - RNA, 21 nt, RNAi
aucauagaucucaggagauuu

SEQ ID NO: 38449 - RNA, 21 nt, RNAi
uuuaguaucuagaguccucua

SEQ ID NO: 38450 - DNA, 21 bp, Homo sapiens
gatctcaggagatagcaatgt

SEQ ID NO: 38451 - RNA, 21 nt, RNAi
ucucaggagauagcaauguuu

SEQ ID NO: 38452 - RNA, 21 nt, RNAi
uuagaguccucuaucguuaca

SEQ ID NO: 38453 - DNA, 21 bp, Homo sapiens
gaggactctacagtattggac

SEQ ID NO: 38454 - RNA, 21 nt, RNAi
ggacucuacaguauuggacuu

SEQ ID NO: 38455 - RNA, 21 nt, RNAi
uuccugagaugucauaaccug

SEQ ID NO: 38456 - DNA, 21 bp, Homo sapiens
gactctacagtattggacctg

SEQ ID NO: 38457 - RNA, 21 nt, RNAi
cucuacaguauuggaccuguu

SEQ ID NO: 38458 - RNA, 21 nt, RNAi
uugagaugucauaaccuggac

SEQ ID NO: 38459 - DNA, 21 bp, Homo sapiens
gatggaagagcgtctaatccg

SEQ ID NO: 38460 - RNA, 21 nt, RNAi
uggaagagcgucuaauccguu

SEQ ID NO: 38461 - RNA, 21 nt, RNAi
uuaccuucucgcagauuaggc

SEQ ID NO: 38462 - DNA, 21 bp, Homo sapiens
gaagagcgtctaatccgacag

SEQ ID NO: 38463 - RNA, 21 nt, RNAi
agagcgucuaauccgacaguu

SEQ ID NO: 38464 - RNA, 21 nt, RNAi
uuucucgcagauuaggcuguc

SEQ ID NO: 38465 - DNA, 21 bp, Homo sapiens
gagcgtctaatccgacagcaa

SEQ ID NO: 38466 - RNA, 21 nt, RNAi
gcgucuaauccgacagcaauu

SEQ ID NO: 38467 - RNA, 21 nt, RNAi
uucgcagauuaggcugucguu

SEQ ID NO: 38468 - DNA, 21 bp, Homo sapiens
gacagcaacaggaaatggaag

SEQ ID NO: 38469 - RNA, 21 nt, RNAi
cagcaacaggaaauggaaguu

SEQ ID NO: 38470 - RNA, 21 nt, RNAi
uugucguuguccuuuaccuuc

SEQ ID NO: 38471 - DNA, 21 bp, Homo sapiens
gaaatggaagaagatcagcgc

SEQ ID NO: 38472 - RNA, 21 nt, RNAi
aauggaagaagaucagcgcuu

SEQ ID NO: 38473 - RNA, 21 nt, RNAi
uuuuaccuucuucuagucgcg

SEQ ID NO: 38474 - DNA, 21 bp, Homo sapiens
gaagaagatcagcgctggctg

SEQ ID NO: 38475 - RNA, 21 nt, RNAi
agaagaucagcgcuggcuguu

SEQ ID NO: 38476 - RNA, 21 nt, RNAi
uuucuucuagucgcgaccgac

SEQ ID NO: 38477 - DNA, 21 bp, Homo sapiens
gaagatcagcgctggctggaa

SEQ ID NO: 38478 - RNA, 21 nt, RNAi
agaucagcgcuggcuggaauu

SEQ ID NO: 38479 - RNA, 21 nt, RNAi
uuucuagucgcgaccgaccuu

SEQ ID NO: 38480 - DNA, 21 bp, Homo sapiens
gaggaaagatttctgattgga

SEQ ID NO: 38481 - RNA, 21 nt, RNAi
ggaaagauuucugauuggauu

SEQ ID NO: 38482 - RNA, 21 nt, RNAi
uuccuuucuaaagacuaaccu

SEQ ID NO: 38483 - DNA, 21 bp, Homo sapiens
gaaagatttctgattggaaac

SEQ ID NO: 38484 - RNA, 21 nt, RNAi
aagauuucugauuggaaacuu

SEQ ID NO: 38485 - RNA, 21 nt, RNAi
uuuucuaaagacuaaccuuug

SEQ ID NO: 38486 - DNA, 21 bp, Homo sapiens
gatttctgattggaaaccaac

SEQ ID NO: 38487 - RNA, 21 nt, RNAi
uuucugauuggaaaccaacuu

SEQ ID NO: 38488 - RNA, 21 nt, RNAi
uuaaagacuaaccuuugguug

SEQ ID NO: 38489 - DNA, 21 bp, Homo sapiens
gaaaccaacatatatatcagc

SEQ ID NO: 38490 - RNA, 21 nt, RNAi
aaccaacauauauaucagcuu

SEQ ID NO: 38491 - RNA, 21 nt, RNAi
uuuugguuguauauauagucg

SEQ ID NO: 38492 - DNA, 21 bp, Homo sapiens
gatcctgcagctccaccaaag

SEQ ID NO: 38493 - RNA, 21 nt, RNAi
uccugcagcuccaccaaaguu

SEQ ID NO: 38494 - RNA, 21 nt, RNAi
uuaggacgucgaggugguuuc

SEQ ID NO: 38495 - DNA, 21 bp, Homo sapiens
gaagccttgccagcctcagca

SEQ ID NO: 38496 - RNA, 21 nt, RNAi
agccuugccagccucagcauu

SEQ ID NO: 38497 - RNA, 21 nt, RNAi
uuucggaacggucggagucgu

SEQ ID NO: 38498 - DNA, 21 bp, Homo sapiens
gaccggtcgaatgataaggtg

SEQ ID NO: 38499 - RNA, 21 nt, RNAi
ccggucgaaugauaagguguu

SEQ ID NO: 38500 - RNA, 21 nt, RNAi
uuggccagcuuacuauuccac

SEQ ID NO: 38501 - DNA, 21 bp, Homo sapiens
gaatgataaggtgtacgagaa

SEQ ID NO: 38502 - RNA, 21 nt, RNAi
augauaagguguacgagaauu

SEQ ID NO: 38503 - RNA, 21 nt, RNAi
uuuacuauuccacaugcucuu

SEQ ID NO: 38504 - DNA, 21 bp, Homo sapiens
gataaggtgtacgagaatgtg

SEQ ID NO: 38505 - RNA, 21 nt, RNAi
uaagguguacgagaauguguu

SEQ ID NO: 38506 - RNA, 21 nt, RNAi
uuauuccacaugcucuuacac

SEQ ID NO: 38507 - DNA, 21 bp, Homo sapiens
gaaagctgtcatcgagatgtc

SEQ ID NO: 38508 - RNA, 21 nt, RNAi
aagcugucaucgagaugucuu

SEQ ID NO: 38509 - RNA, 21 nt, RNAi
uuuucgacaguagcucuacag

SEQ ID NO: 38510 - DNA, 21 bp, Homo sapiens
gaggacattattggccactgt

SEQ ID NO: 38511 - RNA, 21 nt, RNAi
ggacauuauuggccacuguuu

SEQ ID NO: 38512 - RNA, 21 nt, RNAi
uuccuguaauaaccggugaca

SEQ ID NO: 38513 - DNA, 21 bp, Homo sapiens
gacattattggccactgtgga

SEQ ID NO: 38514 - RNA, 21 nt, RNAi
cauuauuggccacuguggauu

SEQ ID NO: 38515 - RNA, 21 nt, RNAi
uuguaauaaccggugacaccu

SEQ ID NO: 38516 - DNA, 21 bp, Homo sapiens
gagagattgagatggcacaga

SEQ ID NO: 38517 - RNA, 21 nt, RNAi
gagauugagauggcacagauu

SEQ ID NO: 38518 - RNA, 21 nt, RNAi
uucucuaacucuaccgugucu

SEQ ID NO: 38519 - DNA, 21 bp, Homo sapiens
gagattgagatggcacagaag

SEQ ID NO: 38520 - RNA, 21 nt, RNAi
gauugagauggcacagaaguu

SEQ ID NO: 38521 - RNA, 21 nt, RNAi
uucuaacucuaccgugucuuc

SEQ ID NO: 38522 - DNA, 21 bp, Homo sapiens
gattgagatggcacagaagct

SEQ ID NO: 38523 - RNA, 21 nt, RNAi
uugagauggcacagaagcuuu

SEQ ID NO: 38524 - RNA, 21 nt, RNAi
uuaacucuaccgugucuucga

SEQ ID NO: 38525 - DNA, 21 bp, Homo sapiens
gagatggcacagaagctattg

SEQ ID NO: 38526 - RNA, 21 nt, RNAi
gauggcacagaagcuauuguu

SEQ ID NO: 38527 - RNA, 21 nt, RNAi
uucuaccgugucuucgauaac

SEQ ID NO: 38528 - DNA, 21 bp, Homo sapiens
gatggcacagaagctattgaa

SEQ ID NO: 38529 - RNA, 21 nt, RNAi
uggcacagaagcuauugaauu

SEQ ID NO: 38530 - RNA, 21 nt, RNAi
uuaccgugucuucgauaacuu

SEQ ID NO: 38531 - DNA, 21 bp, Homo sapiens
gaagctattgaactctgacct

SEQ ID NO: 38532 - RNA, 21 nt, RNAi
agcuauugaacucugaccuuu

SEQ ID NO: 38533 - RNA, 21 nt, RNAi
uuucgauaacuugagacugga

SEQ ID NO: 38534 - DNA, 21 bp, Homo sapiens
gagctcatcaacaagatgaaa

SEQ ID NO: 38535 - RNA, 21 nt, RNAi
gcucaucaacaagaugaaauu

SEQ ID NO: 38536 - RNA, 21 nt, RNAi
uucgaguaguuguucuacuuu

SEQ ID NO: 38537 - DNA, 21 bp, Homo sapiens
gaccagcctccagcaagagta

SEQ ID NO: 38538 - RNA, 21 nt, RNAi
ccagccuccagcaagaguauu

SEQ ID NO: 38539 - RNA, 21 nt, RNAi
uuggucggaggucguucucau

SEQ ID NO: 38540 - DNA, 21 bp, Homo sapiens
gatgtcattgaccaagcaaga

SEQ ID NO: 38541 - RNA, 21 nt, RNAi
ugucauugaccaagcaagauu

SEQ ID NO: 38542 - RNA, 21 nt, RNAi
uuacaguaacugguucguucu

SEQ ID NO: 38543 - DNA, 21 bp, Homo sapiens
gacgagaccacactgagcctc

SEQ ID NO: 38544 - RNA, 21 nt, RNAi
cgagaccacacugagccucuu

SEQ ID NO: 38545 - RNA, 21 nt, RNAi
uugcucuggugugacucggag

SEQ ID NO: 38546 - DNA, 21 bp, Homo sapiens
gaagatgttctctagccttcc

SEQ ID NO: 38547 - RNA, 21 nt, RNAi
agauguucucuagccuuccuu

SEQ ID NO: 38548 - RNA, 21 nt, RNAi
uuucuacaagagaucggaagg

SEQ ID NO: 38549 - DNA, 21 bp, Homo sapiens
gatgttctctagccttccacc

SEQ ID NO: 38550 - RNA, 21 nt, RNAi
uguucucuagccuuccaccuu

SEQ ID NO: 38551 - RNA, 21 nt, RNAi
uuacaagagaucggaaggugg

SEQ ID NO: 38552 - DNA, 21 bp, Homo sapiens
taagagtttactggattctgt

SEQ ID NO: 38553 - RNA, 21 nt, RNAi
agaguuuacuggauucuguuu

SEQ ID NO: 38554 - RNA, 21 nt, RNAi
uuucucaaaugaccuaagaca

SEQ ID NO: 38555 - DNA, 21 bp, Homo sapiens
tactggattctgtcaaggcca

SEQ ID NO: 38556 - RNA, 21 nt, RNAi
cuggauucugucaaggccauu

SEQ ID NO: 38557 - RNA, 21 nt, RNAi
uugaccuaagacaguuccggu

SEQ ID NO: 38558 - DNA, 21 bp, Homo sapiens
tagacaatttgccaaccttaa

SEQ ID NO: 38559 - RNA, 21 nt, RNAi
gacaauuugccaaccuuaauu

SEQ ID NO: 38560 - RNA, 21 nt, RNAi
uucuguuaaacgguuggaauu

SEQ ID NO: 38561 - DNA, 21 bp, Homo sapiens
tacagatttgataaggaatgc

SEQ ID NO: 38562 - RNA, 21 nt, RNAi
cagauuugauaaggaaugcuu

SEQ ID NO: 38563 - RNA, 21 nt, RNAi
uugucuaaacuauuccuuacg

SEQ ID NO: 38564 - DNA, 21 bp, Homo sapiens
taaggaatgcttcaagtgtgc

SEQ ID NO: 38565 - RNA, 21 nt, RNAi
aggaaugcuucaagugugcuu

SEQ ID NO: 38566 - RNA, 21 nt, RNAi
uuuccuuacgaaguucacacg

SEQ ID NO: 38567 - DNA, 21 bp, Homo sapiens
tatttcagtggaactggcaat

SEQ ID NO: 38568 - RNA, 21 nt, RNAi
uuucaguggaacuggcaauuu

SEQ ID NO: 38569 - RNA, 21 nt, RNAi
uuaaagucaccuugaccguua

SEQ ID NO: 38570 - DNA, 21 bp, Homo sapiens
tattcaaacagtgaagacaag

SEQ ID NO: 38571 - RNA, 21 nt, RNAi
uucaaacagugaagacaaguu

SEQ ID NO: 38572 - RNA, 21 nt, RNAi
uuaaguuugucacuucuguuc

SEQ ID NO: 38573 - DNA, 21 bp, Homo sapiens
taaccattgcggagaatatgg

SEQ ID NO: 38574 - RNA, 21 nt, RNAi
accauugcggagaauaugguu

SEQ ID NO: 38575 - RNA, 21 nt, RNAi
uuugguaacgccucuuauacc

SEQ ID NO: 38576 - DNA, 21 bp, Homo sapiens
tatggctgacctaatagatgg

SEQ ID NO: 38577 - RNA, 21 nt, RNAi
uggcugaccuaauagaugguu

SEQ ID NO: 38578 - RNA, 21 nt, RNAi
uuaccgacuggauuaucuacc

SEQ ID NO: 38579 - DNA, 21 bp, Homo sapiens
tactgccggctggtgaatgga

SEQ ID NO: 38580 - RNA, 21 nt, RNAi
cugccggcuggugaauggauu

SEQ ID NO: 38581 - RNA, 21 nt, RNAi
uugacggccgaccacuuaccu

SEQ ID NO: 38582 - DNA, 21 bp, Homo sapiens
tatcatcagacctcagaaaga

SEQ ID NO: 38583 - RNA, 21 nt, RNAi
ucaucagaccucagaaagauu

SEQ ID NO: 38584 - RNA, 21 nt, RNAi
uuaguagucuggagucuuucu

SEQ ID NO: 38585 - DNA, 21 bp, Homo sapiens
taccaaagttggccaacagcg

SEQ ID NO: 38586 - RNA, 21 nt, RNAi
ccaaaguuggccaacagcguu

SEQ ID NO: 38587 - RNA, 21 nt, RNAi
uugguuucaaccgguugucgc

SEQ ID NO: 38588 - DNA, 21 bp, Homo sapiens
tagaacttggacgatgtattg

SEQ ID NO: 38589 - RNA, 21 nt, RNAi
gaacuuggacgauguauuguu

SEQ ID NO: 38590 - RNA, 21 nt, RNAi
uucuugaaccugcuacauaac

SEQ ID NO: 38591 - DNA, 21 bp, Homo sapiens
tattggagaaggccaatttgg

SEQ ID NO: 38592 - RNA, 21 nt, RNAi
uuggagaaggccaauuugguu

SEQ ID NO: 38593 - RNA, 21 nt, RNAi
uuaaccucuuccgguuaaacc

SEQ ID NO: 38594 - DNA, 21 bp, Homo sapiens
tatatgagtccagagaatcca

SEQ ID NO: 38595 - RNA, 21 nt, RNAi
uaugaguccagagaauccauu

SEQ ID NO: 38596 - RNA, 21 nt, RNAi
uuauacucaggucucuuaggu

SEQ ID NO: 38597 - DNA, 21 bp, Homo sapiens
tatgagtccagagaatccagc

SEQ ID NO: 38598 - RNA, 21 nt, RNAi
ugaguccagagaauccagcuu

SEQ ID NO: 38599 - RNA, 21 nt, RNAi
uuacucaggucucuuaggucg

SEQ ID NO: 38600 - DNA, 21 bp, Homo sapiens
tacttcggacagcgtgagaga

SEQ ID NO: 38601 - RNA, 21 nt, RNAi
cuucggacagcgugagagauu

SEQ ID NO: 38602 - RNA, 21 nt, RNAi
uugaagccugucgcacucucu

SEQ ID NO: 38603 - DNA, 21 bp, Homo sapiens
tacacatctttgcactggaat

SEQ ID NO: 38604 - RNA, 21 nt, RNAi
cacaucuuugcacuggaauuu

SEQ ID NO: 38605 - RNA, 21 nt, RNAi
uuguguagaaacgugaccuua

SEQ ID NO: 38606 - DNA, 21 bp, Homo sapiens
taagtgatcctaatgttgatg

SEQ ID NO: 38607 - RNA, 21 nt, RNAi
agugauccuaauguugauguu

SEQ ID NO: 38608 - RNA, 21 nt, RNAi
uuucacuaggauuacaacuac

SEQ ID NO: 38609 - DNA, 21 bp, Homo sapiens
taacaatgcgtcagtttgacc

SEQ ID NO: 38610 - RNA, 21 nt, RNAi
acaaugcgucaguuugaccuu

SEQ ID NO: 38611 - RNA, 21 nt, RNAi
uuuguuacgcagucaaacugg

SEQ ID NO: 38612 - DNA, 21 bp, Homo sapiens
tattgtgaagctgattggagt

SEQ ID NO: 38613 - RNA, 21 nt, RNAi
uugugaagcugauuggaguuu

SEQ ID NO: 38614 - RNA, 21 nt, RNAi
uuaacacuucgacuaaccuca

SEQ ID NO: 38615 - DNA, 21 bp, Homo sapiens
taatcatggagctgtgcacac

SEQ ID NO: 38616 - RNA, 21 nt, RNAi
aucauggagcugugcacacuu

SEQ ID NO: 38617 - RNA, 21 nt, RNAi
uuuaguaccucgacacgugug

SEQ ID NO: 38618 - DNA, 21 bp, Homo sapiens
taaggaaatacagtttggatc

SEQ ID NO: 38619 - RNA, 21 nt, RNAi
aggaaauacaguuuggaucuu

SEQ ID NO: 38620 - RNA, 21 nt, RNAi
uuuccuuuaugucaaaccuag

SEQ ID NO: 38621 - DNA, 21 bp, Homo sapiens
tacagtttggatctagcatct

SEQ ID NO: 38622 - RNA, 21 nt, RNAi
caguuuggaucuagcaucuuu

SEQ ID NO: 38623 - RNA, 21 nt, RNAi
uugucaaaccuagaucguaga

SEQ ID NO: 38624 - DNA, 21 bp, Homo sapiens
tagcatctttgatcctgtatg

SEQ ID NO: 38625 - RNA, 21 nt, RNAi
gcaucuuugauccuguauguu

SEQ ID NO: 38626 - RNA, 21 nt, RNAi
uucguagaaacuaggacauac

SEQ ID NO: 38627 - DNA, 21 bp, Homo sapiens
tatgcctatcagcttagtaca

SEQ ID NO: 38628 - RNA, 21 nt, RNAi
ugccuaucagcuuaguacauu

SEQ ID NO: 38629 - RNA, 21 nt, RNAi
uuacggauagucgaaucaugu

SEQ ID NO: 38630 - DNA, 21 bp, Homo sapiens
tatcagcttagtacagctctt

SEQ ID NO: 38631 - RNA, 21 nt, RNAi
ucagcuuaguacagcucuuuu

SEQ ID NO: 38632 - RNA, 21 nt, RNAi
uuagucgaaucaugucgagaa

SEQ ID NO: 38633 - DNA, 21 bp, Homo sapiens
tagtacagctcttgcatatct

SEQ ID NO: 38634 - RNA, 21 nt, RNAi
guacagcucuugcauaucuuu

SEQ ID NO: 38635 - RNA, 21 nt, RNAi
uucaugucgagaacguauaga

SEQ ID NO: 38636 - DNA, 21 bp, Homo sapiens
tacagctcttgcatatctaga

SEQ ID NO: 38637 - RNA, 21 nt, RNAi
cagcucuugcauaucuagauu

SEQ ID NO: 38638 - RNA, 21 nt, RNAi
uugucgagaacguauagaucu

SEQ ID NO: 38639 - DNA, 21 bp, Homo sapiens
tagtacttactacaaagcttc

SEQ ID NO: 38640 - RNA, 21 nt, RNAi
guacuuacuacaaagcuucuu

SEQ ID NO: 38641 - RNA, 21 nt, RNAi
uucaugaaugauguuucgaag

SEQ ID NO: 38642 - DNA, 21 bp, Homo sapiens
tacttactacaaagcttccaa

SEQ ID NO: 38643 - RNA, 21 nt, RNAi
cuuacuacaaagcuuccaauu

SEQ ID NO: 38644 - RNA, 21 nt, RNAi
uugaaugauguuucgaagguu

SEQ ID NO: 38645 - DNA, 21 bp, Homo sapiens
tactacaaagcttccaaagga

SEQ ID NO: 38646 - RNA, 21 nt, RNAi
cuacaaagcuuccaaaggauu

SEQ ID NO: 38647 - RNA, 21 nt, RNAi
uugauguuucgaagguuuccu

SEQ ID NO: 38648 - DNA, 21 bp, Homo sapiens
tattaaatggatggctccaga

SEQ ID NO: 38649 - RNA, 21 nt, RNAi
uuaaauggauggcuccagauu

SEQ ID NO: 38650 - RNA, 21 nt, RNAi
uuaauuuaccuaccgaggucu

SEQ ID NO: 38651 - DNA, 21 bp, Homo sapiens
taaatggatggctccagagtc

SEQ ID NO: 38652 - RNA, 21 nt, RNAi
aauggauggcuccagagucuu

SEQ ID NO: 38653 - RNA, 21 nt, RNAi
uuuuaccuaccgaggucucag

SEQ ID NO: 38654 - DNA, 21 bp, Homo sapiens
tacctcagctagtgacgtatg

SEQ ID NO: 38655 - RNA, 21 nt, RNAi
ccucagcuagugacguauguu

SEQ ID NO: 38656 - RNA, 21 nt, RNAi
uuggagucgaucacugcauac

SEQ ID NO: 38657 - DNA, 21 bp, Homo sapiens
tagtgacgtatggatgtttgg

SEQ ID NO: 38658 - RNA, 21 nt, RNAi
gugacguauggauguuugguu

SEQ ID NO: 38659 - RNA, 21 nt, RNAi
uucacugcauaccuacaaacc

SEQ ID NO: 38660 - DNA, 21 bp, Homo sapiens
tatggatgtttggtgtgtgta

SEQ ID NO: 38661 - RNA, 21 nt, RNAi
uggauguuugguguguguauu

SEQ ID NO: 38662 - RNA, 21 nt, RNAi
uuaccuacaaaccacacacau

SEQ ID NO: 38663 - DNA, 21 bp, Homo sapiens
tactgatgcatggtgtgaagc

SEQ ID NO: 38664 - RNA, 21 nt, RNAi
cugaugcauggugugaagcuu

SEQ ID NO: 38665 - RNA, 21 nt, RNAi
uugacuacguaccacacuucg

SEQ ID NO: 38666 - DNA, 21 bp, Homo sapiens
taccaatgcctccaaattgtc

SEQ ID NO: 38667 - RNA, 21 nt, RNAi
ccaaugccuccaaauugucuu

SEQ ID NO: 38668 - RNA, 21 nt, RNAi
uugguuacggagguuuaacag

SEQ ID NO: 38669 - DNA, 21 bp, Homo sapiens
tacagccttatgacgaaatgc

SEQ ID NO: 38670 - RNA, 21 nt, RNAi
cagccuuaugacgaaaugcuu

SEQ ID NO: 38671 - RNA, 21 nt, RNAi
uugucggaauacugcuuuacg

SEQ ID NO: 38672 - DNA, 21 bp, Homo sapiens
tactgaacttaaagctcagct

SEQ ID NO: 38673 - RNA, 21 nt, RNAi
cugaacuuaaagcucagcuuu

SEQ ID NO: 38674 - RNA, 21 nt, RNAi
uugacuugaauuucgagucga

SEQ ID NO: 38675 - DNA, 21 bp, Homo sapiens
taaagctcagctcagcacaat

SEQ ID NO: 38676 - RNA, 21 nt, RNAi
aagcucagcucagcacaauuu

SEQ ID NO: 38677 - RNA, 21 nt, RNAi
uuuucgagucgagucguguua

SEQ ID NO: 38678 - DNA, 21 bp, Homo sapiens
tacaaaccaatcattaccagg

SEQ ID NO: 38679 - RNA, 21 nt, RNAi
caaaccaaucauuaccagguu

SEQ ID NO: 38680 - RNA, 21 nt, RNAi
uuguuugguuaguaauggucc

SEQ ID NO: 38681 - DNA, 21 bp, Homo sapiens
tatccaggtcaggcatctctt

SEQ ID NO: 38682 - RNA, 21 nt, RNAi
uccaggucaggcaucucuuuu

SEQ ID NO: 38683 - RNA, 21 nt, RNAi
uuagguccaguccguagagaa

SEQ ID NO: 38684 - DNA, 21 bp, Homo sapiens
tagatctcaggagatagcaat

SEQ ID NO: 38685 - RNA, 21 nt, RNAi
gaucucaggagauagcaauuu

SEQ ID NO: 38686 - RNA, 21 nt, RNAi
uucuagaguccucuaucguua

SEQ ID NO: 38687 - DNA, 21 bp, Homo sapiens
tacagtattggacctgcgagg

SEQ ID NO: 38688 - RNA, 21 nt, RNAi
caguauuggaccugcgagguu

SEQ ID NO: 38689 - RNA, 21 nt, RNAi
uugucauaaccuggacgcucc

SEQ ID NO: 38690 - DNA, 21 bp, Homo sapiens
taatccgacagcaacaggaaa

SEQ ID NO: 38691 - RNA, 21 nt, RNAi
auccgacagcaacaggaaauu

SEQ ID NO: 38692 - RNA, 21 nt, RNAi
uuuaggcugucguuguccuuu

SEQ ID NO: 38693 - DNA, 21 bp, Homo sapiens
taaaccagatcctgcagctcc

SEQ ID NO: 38694 - RNA, 21 nt, RNAi
aaccagauccugcagcuccuu

SEQ ID NO: 38695 - RNA, 21 nt, RNAi
uuuuggucuaggacgucgagg

SEQ ID NO: 38696 - DNA, 21 bp, Homo sapiens
tactgccaacctggaccggtc

SEQ ID NO: 38697 - RNA, 21 nt, RNAi
cugccaaccuggaccggucuu

SEQ ID NO: 38698 - RNA, 21 nt, RNAi
uugacgguuggaccuggccag

SEQ ID NO: 38699 - DNA, 21 bp, Homo sapiens
taaggtgtacgagaatgtgac

SEQ ID NO: 38700 - RNA, 21 nt, RNAi
agguguacgagaaugugacuu

SEQ ID NO: 38701 - RNA, 21 nt, RNAi
uuuccacaugcucuuacacug

SEQ ID NO: 38702 - DNA, 21 bp, Homo sapiens
tatggtgaaggaagtcggctt

SEQ ID NO: 38703 - RNA, 21 nt, RNAi
uggugaaggaagucggcuuuu

SEQ ID NO: 38704 - RNA, 21 nt, RNAi
uuaccacuuccuucagccgaa

SEQ ID NO: 38705 - DNA, 21 bp, Homo sapiens
tattggccactgtggatgaga

SEQ ID NO: 38706 - RNA, 21 nt, RNAi
uuggccacuguggaugagauu

SEQ ID NO: 38707 - RNA, 21 nt, RNAi
uuaaccggugacaccuacucu

SEQ ID NO: 38708 - DNA, 21 bp, Homo sapiens
tatgtcatgaccagcctccag

SEQ ID NO: 38709 - RNA, 21 nt, RNAi
ugucaugaccagccuccaguu

SEQ ID NO: 38710 - RNA, 21 nt, RNAi
uuacaguacuggucggagguc

SEQ ID NO: 38711 - DNA, 21 bp, Homo sapiens
tactcgatgtcattgaccaag

SEQ ID NO: 38712 - RNA, 21 nt, RNAi
cucgaugucauugaccaaguu

SEQ ID NO: 38713 - RNA, 21 nt, RNAi
uugagcuacaguaacugguuc

SEQ ID NO: 38714 - DNA, 21 bp, Homo sapiens
tagccttccaccagcagcgag

SEQ ID NO: 38715 - RNA, 21 nt, RNAi
gccuuccaccagcagcgaguu

SEQ ID NO: 38716 - RNA, 21 nt, RNAi
uucggaagguggucgucgcuc

SEQ ID NO: 38717 - DNA, 21 bp, Homo sapiens
taattcctaaactaccttagc

SEQ ID NO: 38718 - RNA, 21 nt, RNAi
auuccuaaacuaccuuagcuu

SEQ ID NO: 38719 - RNA, 21 nt, RNAi
uuuaaggauuugauggaaucg

SEQ ID NO: 38720 - DNA, 21 bp, Homo sapiens
taaactaccttagctgcatag

SEQ ID NO: 38721 - RNA, 21 nt, RNAi
aacuaccuuagcugcauaguu

SEQ ID NO: 38722 - RNA, 21 nt, RNAi
uuuugauggaaucgacguauc

SEQ ID NO: 38723 - DNA, 21 bp, Homo sapiens
taccttagctgcatagtggaa

SEQ ID NO: 38724 - RNA, 21 nt, RNAi
ccuuagcugcauaguggaauu

SEQ ID NO: 38725 - RNA, 21 nt, RNAi
uuggaaucgacguaucaccuu

SEQ ID NO: 38726 - DNA, 21 bp, Homo sapiens
tagctgcatagtggaagagga

SEQ ID NO: 38727 - RNA, 21 nt, RNAi
gcugcauaguggaagaggauu

SEQ ID NO: 38728 - RNA, 21 nt, RNAi
uucgacguaucaccuucuccu

SEQ ID NO: 38729 - DNA, 21 bp, Homo sapiens
tagtggaagaggagagccgga

SEQ ID NO: 38730 - RNA, 21 nt, RNAi
guggaagaggagagccggauu

SEQ ID NO: 38731 - RNA, 21 nt, RNAi
uucaccuucuccucucggccu

SEQ ID NO: 38732 - DNA, 21 bp, Homo sapiens
aaacagatgattatgctgaga

SEQ ID NO: 38733 - RNA, 21 nt, RNAi
acagaugauuaugcugagauu

SEQ ID NO: 38734 - RNA, 21 nt, RNAi
uuugucuacuaauacgacucu

SEQ ID NO: 38735 - DNA, 21 bp, Homo sapiens
aacagatgattatgctgagat

SEQ ID NO: 38736 - RNA, 21 nt, RNAi
cagaugauuaugcugagauuu

SEQ ID NO: 38737 - RNA, 21 nt, RNAi
uugucuacuaauacgacucua

SEQ ID NO: 38738 - DNA, 21 bp, Homo sapiens
aaagaatagaacttggacgat

SEQ ID NO: 38739 - RNA, 21 nt, RNAi
agaauagaacuuggacgauuu

SEQ ID NO: 38740 - RNA, 21 nt, RNAi
uuucuuaucuugaaccugcua

SEQ ID NO: 38741 - DNA, 21 bp, Homo sapiens
aagaatagaacttggacgatg

SEQ ID NO: 38742 - RNA, 21 nt, RNAi
gaauagaacuuggacgauguu

SEQ ID NO: 38743 - RNA, 21 nt, RNAi
uucuuaucuugaaccugcuac

SEQ ID NO: 38744 - DNA, 21 bp, Homo sapiens
aatagaacttggacgatgtat

SEQ ID NO: 38745 - RNA, 21 nt, RNAi
uagaacuuggacgauguauuu

SEQ ID NO: 38746 - RNA, 21 nt, RNAi
uuaucuugaaccugcuacaua

SEQ ID NO: 38747 - DNA, 21 bp, Homo sapiens
aacttggacgatgtattggag

SEQ ID NO: 38748 - RNA, 21 nt, RNAi
cuuggacgauguauuggaguu

SEQ ID NO: 38749 - RNA, 21 nt, RNAi
uugaaccugcuacauaaccuc

SEQ ID NO: 38750 - DNA, 21 bp, Homo sapiens
aaactgtacttcggacagcgt

SEQ ID NO: 38751 - RNA, 21 nt, RNAi
acuguacuucggacagcguuu

SEQ ID NO: 38752 - RNA, 21 nt, RNAi
uuugacaugaagccugucgca

SEQ ID NO: 38753 - DNA, 21 bp, Homo sapiens
aagaagcctgccattacacat

SEQ ID NO: 38754 - RNA, 21 nt, RNAi
gaagccugccauuacacauuu

SEQ ID NO: 38755 - RNA, 21 nt, RNAi
uucuucggacgguaaugugua

SEQ ID NO: 38756 - DNA, 21 bp, Homo sapiens
aagcctgccattacacatctt

SEQ ID NO: 38757 - RNA, 21 nt, RNAi
gccugccauuacacaucuuuu

SEQ ID NO: 38758 - RNA, 21 nt, RNAi
uucggacgguaauguguagaa

SEQ ID NO: 38759 - DNA, 21 bp, Homo sapiens
aatgcagagttaacaatgcgt

SEQ ID NO: 38760 - RNA, 21 nt, RNAi
ugcagaguuaacaaugcguuu

SEQ ID NO: 38761 - RNA, 21 nt, RNAi
uuacgucucaauuguuacgca

SEQ ID NO: 38762 - DNA, 21 bp, Homo sapiens
aacaatgcgtcagtttgacca

SEQ ID NO: 38763 - RNA, 21 nt, RNAi
caaugcgucaguuugaccauu

SEQ ID NO: 38764 - RNA, 21 nt, RNAi
uuguuacgcagucaaacuggu

SEQ ID NO: 38765 - DNA, 21 bp, Homo sapiens
aatgcgtcagtttgaccatcc

SEQ ID NO: 38766 - RNA, 21 nt, RNAi
ugcgucaguuugaccauccuu

SEQ ID NO: 38767 - RNA, 21 nt, RNAi
uuacgcagucaaacugguagg

SEQ ID NO: 38768 - DNA, 21 bp, Homo sapiens
aattgcctattaaatggatgg

SEQ ID NO: 38769 - RNA, 21 nt, RNAi
uugccuauuaaauggaugguu

SEQ ID NO: 38770 - RNA, 21 nt, RNAi
uuaacggauaauuuaccuacc

SEQ ID NO: 38771 - DNA, 21 bp, Homo sapiens
aatgatgtaatcggtcgaatt

SEQ ID NO: 38772 - RNA, 21 nt, RNAi
ugauguaaucggucgaauuuu

SEQ ID NO: 38773 - RNA, 21 nt, RNAi
uuacuacauuagccagcuuaa

SEQ ID NO: 38774 - DNA, 21 bp, Homo sapiens
aagattaccaatgcctccaaa

SEQ ID NO: 38775 - RNA, 21 nt, RNAi
gauuaccaaugccuccaaauu

SEQ ID NO: 38776 - RNA, 21 nt, RNAi
uucuaaugguuacggagguuu

SEQ ID NO: 38777 - DNA, 21 bp, Homo sapiens
aaatggaagaagatcagcgct

SEQ ID NO: 38778 - RNA, 21 nt, RNAi
auggaagaagaucagcgcuuu

SEQ ID NO: 38779 - RNA, 21 nt, RNAi
uuuaccuucuucuagucgcga

SEQ ID NO: 38780 - DNA, 21 bp, Homo sapiens
aatggaagaagatcagcgctg

SEQ ID NO: 38781 - RNA, 21 nt, RNAi
uggaagaagaucagcgcuguu

SEQ ID NO: 38782 - RNA, 21 nt, RNAi
uuaccuucuucuagucgcgac

SEQ ID NO: 38783 - DNA, 21 bp, Homo sapiens
aaagatttctgattggaaacc

SEQ ID NO: 38784 - RNA, 21 nt, RNAi
agauuucugauuggaaaccuu

SEQ ID NO: 38785 - RNA, 21 nt, RNAi
uuucuaaagacuaaccuuugg

SEQ ID NO: 38786 - DNA, 21 bp, Homo sapiens
aagatttctgattggaaacca

SEQ ID NO: 38787 - RNA, 21 nt, RNAi
gauuucugauuggaaaccauu

SEQ ID NO: 38788 - RNA, 21 nt, RNAi
uucuaaagacuaaccuuuggu

SEQ ID NO: 38789 - DNA, 21 bp, Homo sapiens
aacatatatatcagcctgtgg

SEQ ID NO: 38790 - RNA, 21 nt, RNAi
cauauauaucagccugugguu

SEQ ID NO: 38791 - RNA, 21 nt, RNAi
uuguauauauagucggacacc

SEQ ID NO: 38792 - DNA, 21 bp, Homo sapiens
aatgataaggtgtacgagaat

SEQ ID NO: 38793 - RNA, 21 nt, RNAi
ugauaagguguacgagaauuu

SEQ ID NO: 38794 - RNA, 21 nt, RNAi
uuacuauuccacaugcucuua

SEQ ID NO: 38795 - DNA, 21 bp, Homo sapiens
aaggtgtacgagaatgtgacg

SEQ ID NO: 38796 - RNA, 21 nt, RNAi
gguguacgagaaugugacguu

SEQ ID NO: 38797 - RNA, 21 nt, RNAi
uuccacaugcucuuacacugc

SEQ ID NO: 38798 - DNA, 21 bp, Homo sapiens
catttatcatcagacctcaga

SEQ ID NO: 38799 - RNA, 21 nt, RNAi
uuuaucaucagaccucagauu

SEQ ID NO: 38800 - RNA, 21 nt, RNAi
uuaaauaguagucuggagucu

SEQ ID NO: 38801 - DNA, 21 bp, Homo sapiens
catcaataccaaagttggcca

SEQ ID NO: 38802 - RNA, 21 nt, RNAi
ucaauaccaaaguuggccauu

SEQ ID NO: 38803 - RNA, 21 nt, RNAi
uuaguuaugguuucaaccggu

SEQ ID NO: 38804 - DNA, 21 bp, Homo sapiens
cagctttggcggttgcaatta

SEQ ID NO: 38805 - RNA, 21 nt, RNAi
gcuuuggcgguugcaauuauu

SEQ ID NO: 38806 - RNA, 21 nt, RNAi
uucgaaaccgccaacguuaau

SEQ ID NO: 38807 - DNA, 21 bp, Homo sapiens
caagaagcctgccattacaca

SEQ ID NO: 38808 - RNA, 21 nt, RNAi
agaagccugccauuacacauu

SEQ ID NO: 38809 - RNA, 21 nt, RNAi
uuucuucggacgguaaugugu

SEQ ID NO: 38810 - DNA, 21 bp, Homo sapiens
cagagttaacaatgcgtcagt

SEQ ID NO: 38811 - RNA, 21 nt, RNAi
gaguuaacaaugcgucaguuu

SEQ ID NO: 38812 - RNA, 21 nt, RNAi
uucucaauuguuacgcaguca

SEQ ID NO: 38813 - DNA, 21 bp, Homo sapiens
caatgcgtcagtttgaccatc

SEQ ID NO: 38814 - RNA, 21 nt, RNAi
augcgucaguuugaccaucuu

SEQ ID NO: 38815 - RNA, 21 nt, RNAi
uuuacgcagucaaacugguag

SEQ ID NO: 38816 - DNA, 21 bp, Homo sapiens
catcctcatattgtgaagctg

SEQ ID NO: 38817 - RNA, 21 nt, RNAi
uccucauauugugaagcuguu

SEQ ID NO: 38818 - RNA, 21 nt, RNAi
uuaggaguauaacacuucgac

SEQ ID NO: 38819 - DNA, 21 bp, Homo sapiens
catattgtgaagctgattgga

SEQ ID NO: 38820 - RNA, 21 nt, RNAi
uauugugaagcugauuggauu

SEQ ID NO: 38821 - RNA, 21 nt, RNAi
uuauaacacuucgacuaaccu

SEQ ID NO: 38822 - DNA, 21 bp, Homo sapiens
cagtttggatctagcatcttt

SEQ ID NO: 38823 - RNA, 21 nt, RNAi
guuuggaucuagcaucuuuuu

SEQ ID NO: 38824 - RNA, 21 nt, RNAi
uucaaaccuagaucguagaaa

SEQ ID NO: 38825 - DNA, 21 bp, Homo sapiens
cagcttagtacagctcttgca

SEQ ID NO: 38826 - RNA, 21 nt, RNAi
gcuuaguacagcucuugcauu

SEQ ID NO: 38827 - RNA, 21 nt, RNAi
uucgaaucaugucgagaacgu

SEQ ID NO: 38828 - DNA, 21 bp, Homo sapiens
cattgctgctcggaatgttct

SEQ ID NO: 38829 - RNA, 21 nt, RNAi
uugcugcucggaauguucuuu

SEQ ID NO: 38830 - RNA, 21 nt, RNAi
uuaacgacgagccuuacaaga

SEQ ID NO: 38831 - DNA, 21 bp, Homo sapiens
cagctagtgacgtatggatgt

SEQ ID NO: 38832 - RNA, 21 nt, RNAi
gcuagugacguauggauguuu

SEQ ID NO: 38833 - RNA, 21 nt, RNAi
uucgaucacugcauaccuaca

SEQ ID NO: 38834 - DNA, 21 bp, Homo sapiens
caaaccaatcattaccaggtt

SEQ ID NO: 38835 - RNA, 21 nt, RNAi
aaccaaucauuaccagguuuu

SEQ ID NO: 38836 - RNA, 21 nt, RNAi
uuuugguuaguaaugguccaa

SEQ ID NO: 38837 - DNA, 21 bp, Homo sapiens
caggagatagcaatgtggcag

SEQ ID NO: 38838 - RNA, 21 nt, RNAi
ggagauagcaauguggcaguu

SEQ ID NO: 38839 - RNA, 21 nt, RNAi
uuccucuaucguuacaccguc

SEQ ID NO: 38840 - DNA, 21 bp, Homo sapiens
catctgatggaagagcgtcta

SEQ ID NO: 38841 - RNA, 21 nt, RNAi
ucugauggaagagcgucuauu

SEQ ID NO: 38842 - RNA, 21 nt, RNAi
uuagacuaccuucucgcagau

SEQ ID NO: 38843 - DNA, 21 bp, Homo sapiens
caccgagagattgagatggca

SEQ ID NO: 38844 - RNA, 21 nt, RNAi
ccgagagauugagauggcauu

SEQ ID NO: 38845 - RNA, 21 nt, RNAi
uuggcucucuaacucuaccgu

SEQ ID NO: 38846 - DNA, 21 bp, Homo sapiens
gaaacagatgattatgctgag

SEQ ID NO: 38847 - RNA, 21 nt, RNAi
aacagaugauuaugcugaguu

SEQ ID NO: 38848 - RNA, 21 nt, RNAi
uuuugucuacuaauacgacuc

SEQ ID NO: 38849 - DNA, 21 bp, Homo sapiens
gaagaagatacttacaccatg

SEQ ID NO: 38850 - RNA, 21 nt, RNAi
agaagauacuuacaccauguu

SEQ ID NO: 38851 - RNA, 21 nt, RNAi
uuucuucuaugaaugugguac

SEQ ID NO: 38852 - DNA, 21 bp, Homo sapiens
gaatagaacttggacgatgta

SEQ ID NO: 38853 - RNA, 21 nt, RNAi
auagaacuuggacgauguauu

SEQ ID NO: 38854 - RNA, 21 nt, RNAi
uuuaucuugaaccugcuacau

SEQ ID NO: 38855 - DNA, 21 bp, Homo sapiens
gaacttggacgatgtattgga

SEQ ID NO: 38856 - RNA, 21 nt, RNAi
acuuggacgauguauuggauu

SEQ ID NO: 38857 - RNA, 21 nt, RNAi
uuugaaccugcuacauaaccu

SEQ ID NO: 38858 - DNA, 21 bp, Homo sapiens
gacgatgtattggagaaggcc

SEQ ID NO: 38859 - RNA, 21 nt, RNAi
cgauguauuggagaaggccuu

SEQ ID NO: 38860 - RNA, 21 nt, RNAi
uugcuacauaaccucuuccgg

SEQ ID NO: 38861 - DNA, 21 bp, Homo sapiens
gaagcctgccattacacatct

SEQ ID NO: 38862 - RNA, 21 nt, RNAi
agccugccauuacacaucuuu

SEQ ID NO: 38863 - RNA, 21 nt, RNAi
uuucggacgguaauguguaga

SEQ ID NO: 38864 - DNA, 21 bp, Homo sapiens
gagttaacaatgcgtcagttt

SEQ ID NO: 38865 - RNA, 21 nt, RNAi
guuaacaaugcgucaguuuuu

SEQ ID NO: 38866 - RNA, 21 nt, RNAi
uucaauuguuacgcagucaaa

SEQ ID NO: 38867 - DNA, 21 bp, Homo sapiens
gaccatcctcatattgtgaag

SEQ ID NO: 38868 - RNA, 21 nt, RNAi
ccauccucauauugugaaguu

SEQ ID NO: 38869 - RNA, 21 nt, RNAi
uugguaggaguauaacacuuc

SEQ ID NO: 38870 - DNA, 21 bp, Homo sapiens
gatctagcatctttgatcctg

SEQ ID NO: 38871 - RNA, 21 nt, RNAi
ucuagcaucuuugauccuguu

SEQ ID NO: 38872 - RNA, 21 nt, RNAi
uuagaucguagaaacuaggac

SEQ ID NO: 38873 - DNA, 21 bp, Homo sapiens
gatcctgtatgcctatcagct

SEQ ID NO: 38874 - RNA, 21 nt, RNAi
uccuguaugccuaucagcuuu

SEQ ID NO: 38875 - RNA, 21 nt, RNAi
uuaggacauacggauagucga

SEQ ID NO: 38876 - DNA, 21 bp, Homo sapiens
gacattgctgctcggaatgtt

SEQ ID NO: 38877 - RNA, 21 nt, RNAi
cauugcugcucggaauguuuu

SEQ ID NO: 38878 - RNA, 21 nt, RNAi
uuguaacgacgagccuuacaa

SEQ ID NO: 38879 - DNA, 21 bp, Homo sapiens
gaatgttctggtgtcctcaaa

SEQ ID NO: 38880 - RNA, 21 nt, RNAi
auguucugguguccucaaauu

SEQ ID NO: 38881 - RNA, 21 nt, RNAi
uuuacaagaccacaggaguuu

SEQ ID NO: 38882 - DNA, 21 bp, Homo sapiens
gatgtaatcggtcgaattgaa

SEQ ID NO: 38883 - RNA, 21 nt, RNAi
uguaaucggucgaauugaauu

SEQ ID NO: 38884 - RNA, 21 nt, RNAi
uuacauuagccagcuuaacuu

SEQ ID NO: 38885 - DNA, 21 bp, Homo sapiens
gatctcaggagatagcaatgt

SEQ ID NO: 38886 - RNA, 21 nt, RNAi
ucucaggagauagcaauguuu

SEQ ID NO: 38887 - RNA, 21 nt, RNAi
uuagaguccucuaucguuaca

SEQ ID NO: 38888 - DNA, 21 bp, Homo sapiens
gaagagcgtctaatccgacag

SEQ ID NO: 38889 - RNA, 21 nt, RNAi
agagcgucuaauccgacaguu

SEQ ID NO: 38890 - RNA, 21 nt, RNAi
uuucucgcagauuaggcuguc

SEQ ID NO: 38891 - DNA, 21 bp, Homo sapiens
gagcgtctaatccgacagcaa

SEQ ID NO: 38892 - RNA, 21 nt, RNAi
gcgucuaauccgacagcaauu

SEQ ID NO: 38893 - RNA, 21 nt, RNAi
uucgcagauuaggcugucguu

SEQ ID NO: 38894 - DNA, 21 bp, Homo sapiens
gatttctgattggaaaccaac

SEQ ID NO: 38895 - RNA, 21 nt, RNAi
uuucugauuggaaaccaacuu

SEQ ID NO: 38896 - RNA, 21 nt, RNAi
uuaaagacuaaccuuugguug

SEQ ID NO: 38897 - DNA, 21 bp, Homo sapiens
gaccggtcgaatgataaggtg

SEQ ID NO: 38898 - RNA, 21 nt, RNAi
ccggucgaaugauaagguguu

SEQ ID NO: 38899 - RNA, 21 nt, RNAi
uuggccagcuuacuauuccac

SEQ ID NO: 38900 - DNA, 21 bp, Homo sapiens
gaatgataaggtgtacgagaa

SEQ ID NO: 38901 - RNA, 21 nt, RNAi
augauaagguguacgagaauu

SEQ ID NO: 38902 - RNA, 21 nt, RNAi
uuuacuauuccacaugcucuu

SEQ ID NO: 38903 - DNA, 21 bp, Homo sapiens
gataaggtgtacgagaatgtg

SEQ ID NO: 38904 - RNA, 21 nt, RNAi
uaagguguacgagaauguguu

SEQ ID NO: 38905 - RNA, 21 nt, RNAi
uuauuccacaugcucuuacac

SEQ ID NO: 38906 - DNA, 21 bp, Homo sapiens
gaggacattattggccactgt

SEQ ID NO: 38907 - RNA, 21 nt, RNAi
ggacauuauuggccacuguuu

SEQ ID NO: 38908 - RNA, 21 nt, RNAi
uuccuguaauaaccggugaca

SEQ ID NO: 38909 - DNA, 21 bp, Homo sapiens
gacattattggccactgtgga

SEQ ID NO: 38910 - RNA, 21 nt, RNAi
cauuauuggccacuguggauu

SEQ ID NO: 38911 - RNA, 21 nt, RNAi
uuguaauaaccggugacaccu

SEQ ID NO: 38912 - DNA, 21 bp, Homo sapiens
tagaacttggacgatgtattg

SEQ ID NO: 38913 - RNA, 21 nt, RNAi
gaacuuggacgauguauuguu

SEQ ID NO: 38914 - RNA, 21 nt, RNAi
uucuugaaccugcuacauaac

SEQ ID NO: 38915 - DNA, 21 bp, Homo sapiens
taacaatgcgtcagtttgacc

SEQ ID NO: 38916 - RNA, 21 nt, RNAi
acaaugcgucaguuugaccuu

SEQ ID NO: 38917 - RNA, 21 nt, RNAi
uuuguuacgcagucaaacugg

SEQ ID NO: 38918 - DNA, 21 bp, Homo sapiens
tattgtgaagctgattggagt

SEQ ID NO: 38919 - RNA, 21 nt, RNAi
uugugaagcugauuggaguuu

SEQ ID NO: 38920 - RNA, 21 nt, RNAi
uuaacacuucgacuaaccuca

SEQ ID NO: 38921 - DNA, 21 bp, Homo sapiens
tagcatctttgatcctgtatg

SEQ ID NO: 38922 - RNA, 21 nt, RNAi
gcaucuuugauccuguauguu

SEQ ID NO: 38923 - RNA, 21 nt, RNAi
uucguagaaacuaggacauac

SEQ ID NO: 38924 - DNA, 21 bp, Homo sapiens
tatgcctatcagcttagtaca

SEQ ID NO: 38925 - RNA, 21 nt, RNAi
ugccuaucagcuuaguacauu

SEQ ID NO: 38926 - RNA, 21 nt, RNAi
uuacggauagucgaaucaugu

SEQ ID NO: 38927 - DNA, 21 bp, Homo sapiens
tatcagcttagtacagctctt

SEQ ID NO: 38928 - RNA, 21 nt, RNAi
ucagcuuaguacagcucuuuu

SEQ ID NO: 38929 - RNA, 21 nt, RNAi
uuagucgaaucaugucgagaa

SEQ ID NO: 38930 - DNA, 21 bp, Homo sapiens
tacctcagctagtgacgtatg

SEQ ID NO: 38931 - RNA, 21 nt, RNAi
ccucagcuagugacguauguu

SEQ ID NO: 38932 - RNA, 21 nt, RNAi
uuggagucgaucacugcauac

SEQ ID NO: 38933 - DNA, 21 bp, Homo sapiens
tagtgacgtatggatgtttgg

SEQ ID NO: 38934 - RNA, 21 nt, RNAi
gugacguauggauguuugguu

SEQ ID NO: 38935 - RNA, 21 nt, RNAi
uucacugcauaccuacaaacc

SEQ ID NO: 38936 - DNA, 21 bp, Homo sapiens
tacaaaccaatcattaccagg

SEQ ID NO: 38937 - RNA, 21 nt, RNAi
caaaccaaucauuaccagguu

SEQ ID NO: 38938 - RNA, 21 nt, RNAi
uuguuugguuaguaauggucc

SEQ ID NO: 38939 - DNA, 21 bp, Homo sapiens
tatccaggtcaggcatctctt

SEQ ID NO: 38940 - RNA, 21 nt, RNAi
uccaggucaggcaucucuuuu

SEQ ID NO: 38941 - RNA, 21 nt, RNAi
uuagguccaguccguagagaa

SEQ ID NO: 38942 - DNA, 21 bp, Homo sapiens
taaggtgtacgagaatgtgac

SEQ ID NO: 38943 - RNA, 21 nt, RNAi
agguguacgagaaugugacuu

SEQ ID NO: 38944 - RNA, 21 nt, RNAi
uuuccacaugcucuuacacug

SEQ ID NO: 38945 - DNA, 21 bp, Homo sapiens
tatggtgaaggaagtcggctt

SEQ ID NO: 38946 - RNA, 21 nt, RNAi
uggugaaggaagucggcuuuu

SEQ ID NO: 38947 - RNA, 21 nt, RNAi
uuaccacuuccuucagccgaa

SEQ ID NO: 38948 - DNA, 21 bp, Homo sapiens
aaggaggagcagtggtggtgg

SEQ ID NO: 38949 - RNA, 21 nt, RNAi
ggaggagcagugguggugguu

SEQ ID NO: 38950 - RNA, 21 nt, RNAi
uuccuccucgucaccaccacc

SEQ ID NO: 38951 - DNA, 21 bp, Homo sapiens
aaccgtggttctttggctgca

SEQ ID NO: 38952 - RNA, 21 nt, RNAi
ccgugguucuuuggcugcauu

SEQ ID NO: 38953 - RNA, 21 nt, RNAi
uuggcaccaagaaaccgacgu

SEQ ID NO: 38954 - DNA, 21 bp, Homo sapiens
aagccgagtgccgactacgtc

SEQ ID NO: 38955 - RNA, 21 nt, RNAi
gccgagugccgacuacgucuu

SEQ ID NO: 38956 - RNA, 21 nt, RNAi
uucggcucacggcugaugcag

SEQ ID NO: 38957 - DNA, 21 bp, Homo sapiens
aacgaggcggtgtccttcctc

SEQ ID NO: 38958 - RNA, 21 nt, RNAi
cgaggcgguguccuuccucuu

SEQ ID NO: 38959 - RNA, 21 nt, RNAi
uugcuccgccacaggaaggag

SEQ ID NO: 38960 - DNA, 21 bp, Homo sapiens
aaggtgatttctcgagacaac

SEQ ID NO: 38961 - RNA, 21 nt, RNAi
ggugauuucucgagacaacuu

SEQ ID NO: 38962 - RNA, 21 nt, RNAi
uuccacuaaagagcucuguug

SEQ ID NO: 38963 - DNA, 21 bp, Homo sapiens
aacctcctgcaccagcagatg

SEQ ID NO: 38964 - RNA, 21 nt, RNAi
ccuccugcaccagcagauguu

SEQ ID NO: 38965 - RNA, 21 nt, RNAi
uuggaggacguggucgucuac

SEQ ID NO: 38966 - DNA, 21 bp, Homo sapiens
aagaagctgcggcacaaacac

SEQ ID NO: 38967 - RNA, 21 nt, RNAi
gaagcugcggcacaaacacuu

SEQ ID NO: 38968 - RNA, 21 nt, RNAi
uucuucgacgccguguuugug

SEQ ID NO: 38969 - DNA, 21 bp, Homo sapiens
aagctgcggcacaaacacatc

SEQ ID NO: 38970 - RNA, 21 nt, RNAi
gcugcggcacaaacacaucuu

SEQ ID NO: 38971 - RNA, 21 nt, RNAi
uucgacgccguguuuguguag

SEQ ID NO: 38972 - DNA, 21 bp, Homo sapiens
aaacacatcctggcgctgtac

SEQ ID NO: 38973 - RNA, 21 nt, RNAi
acacauccuggcgcuguacuu

SEQ ID NO: 38974 - RNA, 21 nt, RNAi
uuuguguaggaccgcgacaug

SEQ ID NO: 38975 - DNA, 21 bp, Homo sapiens
aacacatcctggcgctgtacg

SEQ ID NO: 38976 - RNA, 21 nt, RNAi
cacauccuggcgcuguacguu

SEQ ID NO: 38977 - RNA, 21 nt, RNAi
uuguguaggaccgcgacaugc

SEQ ID NO: 38978 - DNA, 21 bp, Homo sapiens
aaggaggacgtctacctctcc

SEQ ID NO: 38979 - RNA, 21 nt, RNAi
ggaggacgucuaccucuccuu

SEQ ID NO: 38980 - RNA, 21 nt, RNAi
uuccuccugcagauggagagg

SEQ ID NO: 38981 - DNA, 21 bp, Homo sapiens
aaatccgacgtctggtccttt

SEQ ID NO: 38982 - RNA, 21 nt, RNAi
auccgacgucugguccuuuuu

SEQ ID NO: 38983 - RNA, 21 nt, RNAi
uuuaggcugcagaccaggaaa

SEQ ID NO: 38984 - DNA, 21 bp, Homo sapiens
aatccgacgtctggtcctttg

SEQ ID NO: 38985 - RNA, 21 nt, RNAi
uccgacgucugguccuuuguu

SEQ ID NO: 38986 - RNA, 21 nt, RNAi
uuaggcugcagaccaggaaac

SEQ ID NO: 38987 - DNA, 21 bp, Homo sapiens
aaccatgaggccttcctgagg

SEQ ID NO: 38988 - RNA, 21 nt, RNAi
ccaugaggccuuccugagguu

SEQ ID NO: 38989 - RNA, 21 nt, RNAi
uugguacuccggaaggacucc

SEQ ID NO: 38990 - DNA, 21 bp, Homo sapiens
aagctgatgctgacatgctgg

SEQ ID NO: 38991 - RNA, 21 nt, RNAi
gcugaugcugacaugcugguu

SEQ ID NO: 38992 - RNA, 21 nt, RNAi
uucgacuacgacuguacgacc

SEQ ID NO: 38993 - DNA, 21 bp, Homo sapiens
aaaggttcacaaatgtggagt

SEQ ID NO: 38994 - RNA, 21 nt, RNAi
agguucacaaauguggaguuu

SEQ ID NO: 38995 - RNA, 21 nt, RNAi
uuuccaaguguuuacaccuca

SEQ ID NO: 38996 - DNA, 21 bp, Homo sapiens
aaggttcacaaatgtggagtg

SEQ ID NO: 38997 - RNA, 21 nt, RNAi
gguucacaaauguggaguguu

SEQ ID NO: 38998 - RNA, 21 nt, RNAi
uuccaaguguuuacaccucac

SEQ ID NO: 38999 - DNA, 21 bp, Homo sapiens
aaatgtggagtgtctgcgtcc

SEQ ID NO: 39000 - RNA, 21 nt, RNAi
auguggagugucugcguccuu

SEQ ID NO: 39001 - RNA, 21 nt, RNAi
uuuacaccucacagacgcagg

SEQ ID NO: 39002 - DNA, 21 bp, Homo sapiens
aatgtggagtgtctgcgtcca

SEQ ID NO: 39003 - RNA, 21 nt, RNAi
uguggagugucugcguccauu

SEQ ID NO: 39004 - RNA, 21 nt, RNAi
uuacaccucacagacgcaggu

SEQ ID NO: 39005 - DNA, 21 bp, Homo sapiens
aatacacgcgtgtgctcctct

SEQ ID NO: 39006 - RNA, 21 nt, RNAi
uacacgcgugugcuccucuuu

SEQ ID NO: 39007 - RNA, 21 nt, RNAi
uuaugugcgcacacgaggaga

SEQ ID NO: 39008 - DNA, 21 bp, Homo sapiens
aaacacgccttgttcctgctc

SEQ ID NO: 39009 - RNA, 21 nt, RNAi
acacgccuuguuccugcucuu

SEQ ID NO: 39010 - RNA, 21 nt, RNAi
uuugugcggaacaaggacgag

SEQ ID NO: 39011 - DNA, 21 bp, Homo sapiens
aacacgccttgttcctgctct

SEQ ID NO: 39012 - RNA, 21 nt, RNAi
cacgccuuguuccugcucuuu

SEQ ID NO: 39013 - RNA, 21 nt, RNAi
uugugcggaacaaggacgaga

SEQ ID NO: 39014 - DNA, 21 bp, Homo sapiens
aaagtcattcgcgtggctcgg

SEQ ID NO: 39015 - RNA, 21 nt, RNAi
agucauucgcguggcucgguu

SEQ ID NO: 39016 - RNA, 21 nt, RNAi
uuucaguaagcgcaccgagcc

SEQ ID NO: 39017 - DNA, 21 bp, Homo sapiens
aaggtgtctctttcatccatg

SEQ ID NO: 39018 - RNA, 21 nt, RNAi
ggugucucuuucauccauguu

SEQ ID NO: 39019 - RNA, 21 nt, RNAi
uuccacagagaaaguagguac

SEQ ID NO: 39020 - DNA, 21 bp, Homo sapiens
aaaggtactaggatttctcaa

SEQ ID NO: 39021 - RNA, 21 nt, RNAi
agguacuaggauuucucaauu

SEQ ID NO: 39022 - RNA, 21 nt, RNAi
uuuccaugauccuaaagaguu

SEQ ID NO: 39023 - DNA, 21 bp, Homo sapiens
aaggtactaggatttctcaaa

SEQ ID NO: 39024 - RNA, 21 nt, RNAi
gguacuaggauuucucaaauu

SEQ ID NO: 39025 - RNA, 21 nt, RNAi
uuccaugauccuaaagaguuu

SEQ ID NO: 39026 - DNA, 21 bp, Homo sapiens
aaagacagatgtcagactaat

SEQ ID NO: 39027 - RNA, 21 nt, RNAi
agacagaugucagacuaauuu

SEQ ID NO: 39028 - RNA, 21 nt, RNAi
uuucugucuacagucugauua

SEQ ID NO: 39029 - DNA, 21 bp, Homo sapiens
aagacagatgtcagactaatc

SEQ ID NO: 39030 - RNA, 21 nt, RNAi
gacagaugucagacuaaucuu

SEQ ID NO: 39031 - RNA, 21 nt, RNAi
uucugucuacagucugauuag

SEQ ID NO: 39032 - DNA, 21 bp, Homo sapiens
aatcaggcttatccgatgtgc

SEQ ID NO: 39033 - RNA, 21 nt, RNAi
ucaggcuuauccgaugugcuu

SEQ ID NO: 39034 - RNA, 21 nt, RNAi
uuaguccgaauaggcuacacg

SEQ ID NO: 39035 - DNA, 21 bp, Homo sapiens
aaatgcgtgtgaaatagtaag

SEQ ID NO: 39036 - RNA, 21 nt, RNAi
augcgugugaaauaguaaguu

SEQ ID NO: 39037 - RNA, 21 nt, RNAi
uuuacgcacacuuuaucauuc

SEQ ID NO: 39038 - DNA, 21 bp, Homo sapiens
aatgcgtgtgaaatagtaagt

SEQ ID NO: 39039 - RNA, 21 nt, RNAi
ugcgugugaaauaguaaguuu

SEQ ID NO: 39040 - RNA, 21 nt, RNAi
uuacgcacacuuuaucauuca

SEQ ID NO: 39041 - DNA, 21 bp, Homo sapiens
aatagtaagtcacactaagtc

SEQ ID NO: 39042 - RNA, 21 nt, RNAi
uaguaagucacacuaagucuu

SEQ ID NO: 39043 - RNA, 21 nt, RNAi
uuaucauucagugugauucag

SEQ ID NO: 39044 - DNA, 21 bp, Homo sapiens
aagtcacactaagtcttctgg

SEQ ID NO: 39045 - RNA, 21 nt, RNAi
gucacacuaagucuucugguu

SEQ ID NO: 39046 - RNA, 21 nt, RNAi
uucagugugauucagaagacc

SEQ ID NO: 39047 - DNA, 21 bp, Homo sapiens
aagtcttctggaggttctatt

SEQ ID NO: 39048 - RNA, 21 nt, RNAi
gucuucuggagguucuauuuu

SEQ ID NO: 39049 - RNA, 21 nt, RNAi
uucagaagaccuccaagauaa

SEQ ID NO: 39050 - DNA, 21 bp, Homo sapiens
cacagcagctcctgacattgg

SEQ ID NO: 39051 - RNA, 21 nt, RNAi
cagcagcuccugacauugguu

SEQ ID NO: 39052 - RNA, 21 nt, RNAi
uugucgucgaggacuguaacc

SEQ ID NO: 39053 - DNA, 21 bp, Homo sapiens
caggaaggaggagcagtggtg

SEQ ID NO: 39054 - RNA, 21 nt, RNAi
ggaaggaggagcagugguguu

SEQ ID NO: 39055 - RNA, 21 nt, RNAi
uuccuuccuccucgucaccac

SEQ ID NO: 39056 - DNA, 21 bp, Homo sapiens
cacaactacctggccgagagg

SEQ ID NO: 39057 - RNA, 21 nt, RNAi
caacuaccuggccgagagguu

SEQ ID NO: 39058 - RNA, 21 nt, RNAi
uuguugauggaccggcucucc

SEQ ID NO: 39059 - DNA, 21 bp, Homo sapiens
caggctgtgcggcactacaag

SEQ ID NO: 39060 - RNA, 21 nt, RNAi
ggcugugcggcacuacaaguu

SEQ ID NO: 39061 - RNA, 21 nt, RNAi
uuccgacacgccgugauguuc

SEQ ID NO: 39062 - DNA, 21 bp, Homo sapiens
caggtggccattaaggtgatt

SEQ ID NO: 39063 - RNA, 21 nt, RNAi
gguggccauuaaggugauuuu

SEQ ID NO: 39064 - RNA, 21 nt, RNAi
uuccaccgguaauuccacuaa

SEQ ID NO: 39065 - DNA, 21 bp, Homo sapiens
cattaaggtgatttctcgaga

SEQ ID NO: 39066 - RNA, 21 nt, RNAi
uuaaggugauuucucgagauu

SEQ ID NO: 39067 - RNA, 21 nt, RNAi
uuaauuccacuaaagagcucu

SEQ ID NO: 39068 - DNA, 21 bp, Homo sapiens
caacctcctgcaccagcagat

SEQ ID NO: 39069 - RNA, 21 nt, RNAi
accuccugcaccagcagauuu

SEQ ID NO: 39070 - RNA, 21 nt, RNAi
uuuggaggacguggucgucua

SEQ ID NO: 39071 - DNA, 21 bp, Homo sapiens
caccagcagatgctgcagtcg

SEQ ID NO: 39072 - RNA, 21 nt, RNAi
ccagcagaugcugcagucguu

SEQ ID NO: 39073 - RNA, 21 nt, RNAi
uuggucgucuacgacgucagc

SEQ ID NO: 39074 - DNA, 21 bp, Homo sapiens
cagcagatgctgcagtcggag

SEQ ID NO: 39075 - RNA, 21 nt, RNAi
gcagaugcugcagucggaguu

SEQ ID NO: 39076 - RNA, 21 nt, RNAi
uucgucuacgacgucagccuc

SEQ ID NO: 39077 - DNA, 21 bp, Homo sapiens
cagatgctgcagtcggagatc

SEQ ID NO: 39078 - RNA, 21 nt, RNAi
gaugcugcagucggagaucuu

SEQ ID NO: 39079 - RNA, 21 nt, RNAi
uucuacgacgucagccucuag

SEQ ID NO: 39080 - DNA, 21 bp, Homo sapiens
cagtcggagatccaggccatg

SEQ ID NO: 39081 - RNA, 21 nt, RNAi
gucggagauccaggccauguu

SEQ ID NO: 39082 - RNA, 21 nt, RNAi
uucagccucuagguccgguac

SEQ ID NO: 39083 - DNA, 21 bp, Homo sapiens
caggccatgaagaagctgcgg

SEQ ID NO: 39084 - RNA, 21 nt, RNAi
ggccaugaagaagcugcgguu

SEQ ID NO: 39085 - RNA, 21 nt, RNAi
uuccgguacuucuucgacgcc

SEQ ID NO: 39086 - DNA, 21 bp, Homo sapiens
catgaagaagctgcggcacaa

SEQ ID NO: 39087 - RNA, 21 nt, RNAi
ugaagaagcugcggcacaauu

SEQ ID NO: 39088 - RNA, 21 nt, RNAi
uuacuucuucgacgccguguu

SEQ ID NO: 39089 - DNA, 21 bp, Homo sapiens
cacaaacacatcctggcgctg

SEQ ID NO: 39090 - RNA, 21 nt, RNAi
caaacacauccuggcgcuguu

SEQ ID NO: 39091 - RNA, 21 nt, RNAi
uuguuuguguaggaccgcgac

SEQ ID NO: 39092 - DNA, 21 bp, Homo sapiens
caaacacatcctggcgctgta

SEQ ID NO: 39093 - RNA, 21 nt, RNAi
aacacauccuggcgcuguauu

SEQ ID NO: 39094 - RNA, 21 nt, RNAi
uuuuguguaggaccgcgacau

SEQ ID NO: 39095 - DNA, 21 bp, Homo sapiens
catcatcacggagctcatggc

SEQ ID NO: 39096 - RNA, 21 nt, RNAi
ucaucacggagcucauggcuu

SEQ ID NO: 39097 - RNA, 21 nt, RNAi
uuaguagugccucgaguaccg

SEQ ID NO: 39098 - DNA, 21 bp, Homo sapiens
catcacggagctcatggccaa

SEQ ID NO: 39099 - RNA, 21 nt, RNAi
ucacggagcucauggccaauu

SEQ ID NO: 39100 - RNA, 21 nt, RNAi
uuagugccucgaguaccgguu

SEQ ID NO: 39101 - DNA, 21 bp, Homo sapiens
catgtgttacctggagtcgca

SEQ ID NO: 39102 - RNA, 21 nt, RNAi
uguguuaccuggagucgcauu

SEQ ID NO: 39103 - RNA, 21 nt, RNAi
uuacacaauggaccucagcgu

SEQ ID NO: 39104 - DNA, 21 bp, Homo sapiens
caggcttatcaaggaggacgt

SEQ ID NO: 39105 - RNA, 21 nt, RNAi
ggcuuaucaaggaggacguuu

SEQ ID NO: 39106 - RNA, 21 nt, RNAi
uuccgaauaguuccuccugca

SEQ ID NO: 39107 - DNA, 21 bp, Homo sapiens
caaggaggacgtctacctctc

SEQ ID NO: 39108 - RNA, 21 nt, RNAi
aggaggacgucuaccucucuu

SEQ ID NO: 39109 - RNA, 21 nt, RNAi
uuuccuccugcagauggagag

SEQ ID NO: 39110 - DNA, 21 bp, Homo sapiens
cattactccaccaaatccgac

SEQ ID NO: 39111 - RNA, 21 nt, RNAi
uuacuccaccaaauccgacuu

SEQ ID NO: 39112 - RNA, 21 nt, RNAi
uuaaugaggugguuuaggcug

SEQ ID NO: 39113 - DNA, 21 bp, Homo sapiens
caccaaatccgacgtctggtc

SEQ ID NO: 39114 - RNA, 21 nt, RNAi
ccaaauccgacgucuggucuu

SEQ ID NO: 39115 - RNA, 21 nt, RNAi
uugguuuaggcugcagaccag

SEQ ID NO: 39116 - DNA, 21 bp, Homo sapiens
caaatccgacgtctggtcctt

SEQ ID NO: 39117 - RNA, 21 nt, RNAi
aauccgacgucugguccuuuu

SEQ ID NO: 39118 - RNA, 21 nt, RNAi
uuuuaggcugcagaccaggaa

SEQ ID NO: 39119 - DNA, 21 bp, Homo sapiens
caggcatgtccaaccatgagg

SEQ ID NO: 39120 - RNA, 21 nt, RNAi
ggcauguccaaccaugagguu

SEQ ID NO: 39121 - RNA, 21 nt, RNAi
uuccguacagguugguacucc

SEQ ID NO: 39122 - DNA, 21 bp, Homo sapiens
catgtccaaccatgaggcctt

SEQ ID NO: 39123 - RNA, 21 nt, RNAi
uguccaaccaugaggccuuuu

SEQ ID NO: 39124 - RNA, 21 nt, RNAi
uuacagguugguacuccggaa

SEQ ID NO: 39125 - DNA, 21 bp, Homo sapiens
caaccatgaggccttcctgag

SEQ ID NO: 39126 - RNA, 21 nt, RNAi
accaugaggccuuccugaguu

SEQ ID NO: 39127 - RNA, 21 nt, RNAi
uuugguacuccggaaggacuc

SEQ ID NO: 39128 - DNA, 21 bp, Homo sapiens
cagcgtgcacaagctgatgct

SEQ ID NO: 39129 - RNA, 21 nt, RNAi
gcgugcacaagcugaugcuuu

SEQ ID NO: 39130 - RNA, 21 nt, RNAi
uucgcacguguucgacuacga

SEQ ID NO: 39131 - DNA, 21 bp, Homo sapiens
cacaagctgatgctgacatgc

SEQ ID NO: 39132 - RNA, 21 nt, RNAi
caagcugaugcugacaugcuu

SEQ ID NO: 39133 - RNA, 21 nt, RNAi
uuguucgacuacgacuguacg

SEQ ID NO: 39134 - DNA, 21 bp, Homo sapiens
caagctgatgctgacatgctg

SEQ ID NO: 39135 - RNA, 21 nt, RNAi
agcugaugcugacaugcuguu

SEQ ID NO: 39136 - RNA, 21 nt, RNAi
uuucgacuacgacuguacgac

SEQ ID NO: 39137 - DNA, 21 bp, Homo sapiens
cagcttcaccagctacgagaa

SEQ ID NO: 39138 - RNA, 21 nt, RNAi
gcuucaccagcuacgagaauu

SEQ ID NO: 39139 - RNA, 21 nt, RNAi
uucgaaguggucgaugcucuu

SEQ ID NO: 39140 - DNA, 21 bp, Homo sapiens
caggaaaggttcacaaatgtg

SEQ ID NO: 39141 - RNA, 21 nt, RNAi
ggaaagguucacaaauguguu

SEQ ID NO: 39142 - RNA, 21 nt, RNAi
uuccuuuccaaguguuuacac

SEQ ID NO: 39143 - DNA, 21 bp, Homo sapiens
cacaaatgtggagtgtctgcg

SEQ ID NO: 39144 - RNA, 21 nt, RNAi
caaauguggagugucugcguu

SEQ ID NO: 39145 - RNA, 21 nt, RNAi
uuguuuacaccucacagacgc

SEQ ID NO: 39146 - DNA, 21 bp, Homo sapiens
caaatgtggagtgtctgcgtc

SEQ ID NO: 39147 - RNA, 21 nt, RNAi
aauguggagugucugcgucuu

SEQ ID NO: 39148 - RNA, 21 nt, RNAi
uuuuacaccucacagacgcag

SEQ ID NO: 39149 - DNA, 21 bp, Homo sapiens
caatacacgcgtgtgctcctc

SEQ ID NO: 39150 - RNA, 21 nt, RNAi
auacacgcgugugcuccucuu

SEQ ID NO: 39151 - RNA, 21 nt, RNAi
uuuaugugcgcacacgaggag

SEQ ID NO: 39152 - DNA, 21 bp, Homo sapiens
cacgcgtgtgctcctctcctt

SEQ ID NO: 39153 - RNA, 21 nt, RNAi
cgcgugugcuccucuccuuuu

SEQ ID NO: 39154 - RNA, 21 nt, RNAi
uugcgcacacgaggagaggaa

SEQ ID NO: 39155 - DNA, 21 bp, Homo sapiens
cacgaagccagcagaggtcag

SEQ ID NO: 39156 - RNA, 21 nt, RNAi
cgaagccagcagaggucaguu

SEQ ID NO: 39157 - RNA, 21 nt, RNAi
uugcuucggucgucuccaguc

SEQ ID NO: 39158 - DNA, 21 bp, Homo sapiens
caaacacgccttgttcctgct

SEQ ID NO: 39159 - RNA, 21 nt, RNAi
aacacgccuuguuccugcuuu

SEQ ID NO: 39160 - RNA, 21 nt, RNAi
uuuugugcggaacaaggacga

SEQ ID NO: 39161 - DNA, 21 bp, Homo sapiens
cacgccttgttcctgctcttc

SEQ ID NO: 39162 - RNA, 21 nt, RNAi
cgccuuguuccugcucuucuu

SEQ ID NO: 39163 - RNA, 21 nt, RNAi
uugcggaacaaggacgagaag

SEQ ID NO: 39164 - DNA, 21 bp, Homo sapiens
caggtgtttctttcctgtttg

SEQ ID NO: 39165 - RNA, 21 nt, RNAi
gguguuucuuuccuguuuguu

SEQ ID NO: 39166 - RNA, 21 nt, RNAi
uuccacaaagaaaggacaaac

SEQ ID NO: 39167 - DNA, 21 bp, Homo sapiens
cagctcagtttcaccgtccac

SEQ ID NO: 39168 - RNA, 21 nt, RNAi
gcucaguuucaccguccacuu

SEQ ID NO: 39169 - RNA, 21 nt, RNAi
uucgagucaaaguggcaggug

SEQ ID NO: 39170 - DNA, 21 bp, Homo sapiens
cagtttcaccgtccacgtcca

SEQ ID NO: 39171 - RNA, 21 nt, RNAi
guuucaccguccacguccauu

SEQ ID NO: 39172 - RNA, 21 nt, RNAi
uucaaaguggcaggugcaggu

SEQ ID NO: 39173 - DNA, 21 bp, Homo sapiens
caccttcacctttgtcgctgg

SEQ ID NO: 39174 - RNA, 21 nt, RNAi
ccuucaccuuugucgcugguu

SEQ ID NO: 39175 - RNA, 21 nt, RNAi
uuggaaguggaaacagcgacc

SEQ ID NO: 39176 - DNA, 21 bp, Homo sapiens
catccatggttaagtcataaa

SEQ ID NO: 39177 - RNA, 21 nt, RNAi
uccaugguuaagucauaaauu

SEQ ID NO: 39178 - RNA, 21 nt, RNAi
uuagguaccaauucaguauuu

SEQ ID NO: 39179 - DNA, 21 bp, Homo sapiens
cacggtggctcatgcctgtaa

SEQ ID NO: 39180 - RNA, 21 nt, RNAi
cgguggcucaugccuguaauu

SEQ ID NO: 39181 - RNA, 21 nt, RNAi
uugccaccgaguacggacauu

SEQ ID NO: 39182 - DNA, 21 bp, Homo sapiens
caggtggatcacgaggtcagg

SEQ ID NO: 39183 - RNA, 21 nt, RNAi
gguggaucacgaggucagguu

SEQ ID NO: 39184 - RNA, 21 nt, RNAi
uuccaccuagugcuccagucc

SEQ ID NO: 39185 - DNA, 21 bp, Homo sapiens
cacgaggtcaggagatcgaca

SEQ ID NO: 39186 - RNA, 21 nt, RNAi
cgaggucaggagaucgacauu

SEQ ID NO: 39187 - RNA, 21 nt, RNAi
uugcuccaguccucuagcugu

SEQ ID NO: 39188 - DNA, 21 bp, Homo sapiens
caggagatcgacaccatcctg

SEQ ID NO: 39189 - RNA, 21 nt, RNAi
ggagaucgacaccauccuguu

SEQ ID NO: 39190 - RNA, 21 nt, RNAi
uuccucuagcugugguaggac

SEQ ID NO: 39191 - DNA, 21 bp, Homo sapiens
caccatcctggctaacacggt

SEQ ID NO: 39192 - RNA, 21 nt, RNAi
ccauccuggcuaacacgguuu

SEQ ID NO: 39193 - RNA, 21 nt, RNAi
uugguaggaccgauugugcca

SEQ ID NO: 39194 - DNA, 21 bp, Homo sapiens
catcctggctaacacggtgaa

SEQ ID NO: 39195 - RNA, 21 nt, RNAi
uccuggcuaacacggugaauu

SEQ ID NO: 39196 - RNA, 21 nt, RNAi
uuaggaccgauugugccacuu

SEQ ID NO: 39197 - DNA, 21 bp, Homo sapiens
cagagcgagactccatctcaa

SEQ ID NO: 39198 - RNA, 21 nt, RNAi
gagcgagacuccaucucaauu

SEQ ID NO: 39199 - RNA, 21 nt, RNAi
uucucgcucugagguagaguu

SEQ ID NO: 39200 - DNA, 21 bp, Homo sapiens
cagatgtcagactaatcaggc

SEQ ID NO: 39201 - RNA, 21 nt, RNAi
gaugucagacuaaucaggcuu

SEQ ID NO: 39202 - RNA, 21 nt, RNAi
uucuacagucugauuaguccg

SEQ ID NO: 39203 - DNA, 21 bp, Homo sapiens
cagactaatcaggcttatccg

SEQ ID NO: 39204 - RNA, 21 nt, RNAi
gacuaaucaggcuuauccguu

SEQ ID NO: 39205 - RNA, 21 nt, RNAi
uucugauuaguccgaauaggc

SEQ ID NO: 39206 - DNA, 21 bp, Homo sapiens
caggcttatccgatgtgctac

SEQ ID NO: 39207 - RNA, 21 nt, RNAi
ggcuuauccgaugugcuacuu

SEQ ID NO: 39208 - RNA, 21 nt, RNAi
uuccgaauaggcuacacgaug

SEQ ID NO: 39209 - DNA, 21 bp, Homo sapiens
catgagatggaaatgcgtgtg

SEQ ID NO: 39210 - RNA, 21 nt, RNAi
ugagauggaaaugcguguguu

SEQ ID NO: 39211 - RNA, 21 nt, RNAi
uuacucuaccuuuacgcacac

SEQ ID NO: 39212 - DNA, 21 bp, Homo sapiens
cacactaagtcttctggaggt

SEQ ID NO: 39213 - RNA, 21 nt, RNAi
cacuaagucuucuggagguuu

SEQ ID NO: 39214 - RNA, 21 nt, RNAi
uugugauucagaagaccucca

SEQ ID NO: 39215 - DNA, 21 bp, Homo sapiens
cactaagtcttctggaggttc

SEQ ID NO: 39216 - RNA, 21 nt, RNAi
cuaagucuucuggagguucuu

SEQ ID NO: 39217 - RNA, 21 nt, RNAi
uugauucagaagaccuccaag

SEQ ID NO: 39218 - DNA, 21 bp, Homo sapiens
gagtgcctgagtgtccataag

SEQ ID NO: 39219 - RNA, 21 nt, RNAi
gugccugaguguccauaaguu

SEQ ID NO: 39220 - RNA, 21 nt, RNAi
uucacggacucacagguauuc

SEQ ID NO: 39221 - DNA, 21 bp, Homo sapiens
gacggacgaggagctgagctt

SEQ ID NO: 39222 - RNA, 21 nt, RNAi
cggacgaggagcugagcuuuu

SEQ ID NO: 39223 - RNA, 21 nt, RNAi
uugccugcuccucgacucgaa

SEQ ID NO: 39224 - DNA, 21 bp, Homo sapiens
gaaggaggagcagtggtggtg

SEQ ID NO: 39225 - RNA, 21 nt, RNAi
aggaggagcaguggugguguu

SEQ ID NO: 39226 - RNA, 21 nt, RNAi
uuuccuccucgucaccaccac

SEQ ID NO: 39227 - DNA, 21 bp, Homo sapiens
gagtcggaaccgtggttcttt

SEQ ID NO: 39228 - RNA, 21 nt, RNAi
gucggaaccgugguucuuuuu

SEQ ID NO: 39229 - RNA, 21 nt, RNAi
uucagccuuggcaccaagaaa

SEQ ID NO: 39230 - DNA, 21 bp, Homo sapiens
gaaccgtggttctttggctgc

SEQ ID NO: 39231 - RNA, 21 nt, RNAi
accgugguucuuuggcugcuu

SEQ ID NO: 39232 - RNA, 21 nt, RNAi
uuuggcaccaagaaaccgacg

SEQ ID NO: 39233 - DNA, 21 bp, Homo sapiens
gagaagccgagtgccgactac

SEQ ID NO: 39234 - RNA, 21 nt, RNAi
gaagccgagugccgacuacuu

SEQ ID NO: 39235 - RNA, 21 nt, RNAi
uucuucggcucacggcugaug

SEQ ID NO: 39236 - DNA, 21 bp, Homo sapiens
gaagccgagtgccgactacgt

SEQ ID NO: 39237 - RNA, 21 nt, RNAi
agccgagugccgacuacguuu

SEQ ID NO: 39238 - RNA, 21 nt, RNAi
uuucggcucacggcugaugca

SEQ ID NO: 39239 - DNA, 21 bp, Homo sapiens
gagtgccgactacgtcctgtc

SEQ ID NO: 39240 - RNA, 21 nt, RNAi
gugccgacuacguccugucuu

SEQ ID NO: 39241 - RNA, 21 nt, RNAi
uucacggcugaugcaggacag

SEQ ID NO: 39242 - DNA, 21 bp, Homo sapiens
gaacgaggcggtgtccttcct

SEQ ID NO: 39243 - RNA, 21 nt, RNAi
acgaggcgguguccuuccuuu

SEQ ID NO: 39244 - RNA, 21 nt, RNAi
uuugcuccgccacaggaagga

SEQ ID NO: 39245 - DNA, 21 bp, Homo sapiens
gagcttgtgaactaccacagg

SEQ ID NO: 39246 - RNA, 21 nt, RNAi
gcuugugaacuaccacagguu

SEQ ID NO: 39247 - RNA, 21 nt, RNAi
uucgaacacuugauggugucc

SEQ ID NO: 39248 - DNA, 21 bp, Homo sapiens
gaggagttcacgctctgcagg

SEQ ID NO: 39249 - RNA, 21 nt, RNAi
ggaguucacgcucugcagguu

SEQ ID NO: 39250 - RNA, 21 nt, RNAi
uuccucaagugcgagacgucc

SEQ ID NO: 39251 - DNA, 21 bp, Homo sapiens
gagttcacgctctgcaggaag

SEQ ID NO: 39252 - RNA, 21 nt, RNAi
guucacgcucugcaggaaguu

SEQ ID NO: 39253 - RNA, 21 nt, RNAi
uucaagugcgagacguccuuc

SEQ ID NO: 39254 - DNA, 21 bp, Homo sapiens
gatttctcgagacaacctcct

SEQ ID NO: 39255 - RNA, 21 nt, RNAi
uuucucgagacaaccuccuuu

SEQ ID NO: 39256 - RNA, 21 nt, RNAi
uuaaagagcucuguuggagga

SEQ ID NO: 39257 - DNA, 21 bp, Homo sapiens
gagacaacctcctgcaccagc

SEQ ID NO: 39258 - RNA, 21 nt, RNAi
gacaaccuccugcaccagcuu

SEQ ID NO: 39259 - RNA, 21 nt, RNAi
uucuguuggaggacguggucg

SEQ ID NO: 39260 - DNA, 21 bp, Homo sapiens
gacaacctcctgcaccagcag

SEQ ID NO: 39261 - RNA, 21 nt, RNAi
caaccuccugcaccagcaguu

SEQ ID NO: 39262 - RNA, 21 nt, RNAi
uuguuggaggacguggucguc

SEQ ID NO: 39263 - DNA, 21 bp, Homo sapiens
gatgctgcagtcggagatcca

SEQ ID NO: 39264 - RNA, 21 nt, RNAi
ugcugcagucggagauccauu

SEQ ID NO: 39265 - RNA, 21 nt, RNAi
uuacgacgucagccucuaggu

SEQ ID NO: 39266 - DNA, 21 bp, Homo sapiens
gagatccaggccatgaagaag

SEQ ID NO: 39267 - RNA, 21 nt, RNAi
gauccaggccaugaagaaguu

SEQ ID NO: 39268 - RNA, 21 nt, RNAi
uucuagguccgguacuucuuc

SEQ ID NO: 39269 - DNA, 21 bp, Homo sapiens
gatccaggccatgaagaagct

SEQ ID NO: 39270 - RNA, 21 nt, RNAi
uccaggccaugaagaagcuuu

SEQ ID NO: 39271 - RNA, 21 nt, RNAi
uuagguccgguacuucuucga

SEQ ID NO: 39272 - DNA, 21 bp, Homo sapiens
gaagaagctgcggcacaaaca

SEQ ID NO: 39273 - RNA, 21 nt, RNAi
agaagcugcggcacaaacauu

SEQ ID NO: 39274 - RNA, 21 nt, RNAi
uuucuucgacgccguguuugu

SEQ ID NO: 39275 - DNA, 21 bp, Homo sapiens
gaagctgcggcacaaacacat

SEQ ID NO: 39276 - RNA, 21 nt, RNAi
agcugcggcacaaacacauuu

SEQ ID NO: 39277 - RNA, 21 nt, RNAi
uuucgacgccguguuugugua

SEQ ID NO: 39278 - DNA, 21 bp, Homo sapiens
gagctgctccgcgactctgat

SEQ ID NO: 39279 - RNA, 21 nt, RNAi
gcugcuccgcgacucugauuu

SEQ ID NO: 39280 - RNA, 21 nt, RNAi
uucgacgaggcgcugagacua

SEQ ID NO: 39281 - DNA, 21 bp, Homo sapiens
gactctgatgagaaagtcctg

SEQ ID NO: 39282 - RNA, 21 nt, RNAi
cucugaugagaaaguccuguu

SEQ ID NO: 39283 - RNA, 21 nt, RNAi
uugagacuacucuuucaggac

SEQ ID NO: 39284 - DNA, 21 bp, Homo sapiens
gagtcgcagaattacatccac

SEQ ID NO: 39285 - RNA, 21 nt, RNAi
gucgcagaauuacauccacuu

SEQ ID NO: 39286 - RNA, 21 nt, RNAi
uucagcgucuuaauguaggug

SEQ ID NO: 39287 - DNA, 21 bp, Homo sapiens
gaggccattactccaccaaat

SEQ ID NO: 39288 - RNA, 21 nt, RNAi
ggccauuacuccaccaaauuu

SEQ ID NO: 39289 - RNA, 21 nt, RNAi
uuccgguaaugaggugguuua

SEQ ID NO: 39290 - DNA, 21 bp, Homo sapiens
gattctcctgcatgagatgtt

SEQ ID NO: 39291 - RNA, 21 nt, RNAi
uucuccugcaugagauguuuu

SEQ ID NO: 39292 - RNA, 21 nt, RNAi
uuaagaggacguacucuacaa

SEQ ID NO: 39293 - DNA, 21 bp, Homo sapiens
gatgctgacatgctggtgcag

SEQ ID NO: 39294 - RNA, 21 nt, RNAi
ugcugacaugcuggugcaguu

SEQ ID NO: 39295 - RNA, 21 nt, RNAi
uuacgacuguacgaccacguc

SEQ ID NO: 39296 - DNA, 21 bp, Homo sapiens
gagaggctctccagcttcacc

SEQ ID NO: 39297 - RNA, 21 nt, RNAi
gaggcucuccagcuucaccuu

SEQ ID NO: 39298 - RNA, 21 nt, RNAi
uucuccgagaggucgaagugg

SEQ ID NO: 39299 - DNA, 21 bp, Homo sapiens
gaggctctccagcttcaccag

SEQ ID NO: 39300 - RNA, 21 nt, RNAi
ggcucuccagcuucaccaguu

SEQ ID NO: 39301 - RNA, 21 nt, RNAi
uuccgagaggucgaagugguc

SEQ ID NO: 39302 - DNA, 21 bp, Homo sapiens
gaaaggttcacaaatgtggag

SEQ ID NO: 39303 - RNA, 21 nt, RNAi
aagguucacaaauguggaguu

SEQ ID NO: 39304 - RNA, 21 nt, RNAi
uuuuccaaguguuuacaccuc

SEQ ID NO: 39305 - DNA, 21 bp, Homo sapiens
gagtgtctgcgtccaatacac

SEQ ID NO: 39306 - RNA, 21 nt, RNAi
gugucugcguccaauacacuu

SEQ ID NO: 39307 - RNA, 21 nt, RNAi
uucacagacgcagguuaugug

SEQ ID NO: 39308 - DNA, 21 bp, Homo sapiens
gagcctgcagatgagatccgg

SEQ ID NO: 39309 - RNA, 21 nt, RNAi
gccugcagaugagauccgguu

SEQ ID NO: 39310 - RNA, 21 nt, RNAi
uucggacgucuacucuaggcc

SEQ ID NO: 39311 - DNA, 21 bp, Homo sapiens
gagactgacacgaagccagca

SEQ ID NO: 39312 - RNA, 21 nt, RNAi
gacugacacgaagccagcauu

SEQ ID NO: 39313 - RNA, 21 nt, RNAi
uucugacugugcuucggucgu

SEQ ID NO: 39314 - DNA, 21 bp, Homo sapiens
gactgacacgaagccagcaga

SEQ ID NO: 39315 - RNA, 21 nt, RNAi
cugacacgaagccagcagauu

SEQ ID NO: 39316 - RNA, 21 nt, RNAi
uugacugugcuucggucgucu

SEQ ID NO: 39317 - DNA, 21 bp, Homo sapiens
gacacgaagccagcagaggtc

SEQ ID NO: 39318 - RNA, 21 nt, RNAi
cacgaagccagcagaggucuu

SEQ ID NO: 39319 - RNA, 21 nt, RNAi
uugugcuucggucgucuccag

SEQ ID NO: 39320 - DNA, 21 bp, Homo sapiens
gaagccagcagaggtcagagg

SEQ ID NO: 39321 - RNA, 21 nt, RNAi
agccagcagaggucagagguu

SEQ ID NO: 39322 - RNA, 21 nt, RNAi
uuucggucgucuccagucucc

SEQ ID NO: 39323 - DNA, 21 bp, Homo sapiens
gaggcaaacacgccttgttcc

SEQ ID NO: 39324 - RNA, 21 nt, RNAi
ggcaaacacgccuuguuccuu

SEQ ID NO: 39325 - RNA, 21 nt, RNAi
uuccguuugugcggaacaagg

SEQ ID NO: 39326 - DNA, 21 bp, Homo sapiens
gagaaagtcattcgcgtggct

SEQ ID NO: 39327 - RNA, 21 nt, RNAi
gaaagucauucgcguggcuuu

SEQ ID NO: 39328 - RNA, 21 nt, RNAi
uucuuucaguaagcgcaccga

SEQ ID NO: 39329 - DNA, 21 bp, Homo sapiens
gaaagtcattcgcgtggctcg

SEQ ID NO: 39330 - RNA, 21 nt, RNAi
aagucauucgcguggcucguu

SEQ ID NO: 39331 - RNA, 21 nt, RNAi
uuuucaguaagcgcaccgagc

SEQ ID NO: 39332 - DNA, 21 bp, Homo sapiens
gacgctcatgtaaatttggtt

SEQ ID NO: 39333 - RNA, 21 nt, RNAi
cgcucauguaaauuugguuuu

SEQ ID NO: 39334 - RNA, 21 nt, RNAi
uugcgaguacauuuaaaccaa

SEQ ID NO: 39335 - DNA, 21 bp, Homo sapiens
gagagcttggccttatgacca

SEQ ID NO: 39336 - RNA, 21 nt, RNAi
gagcuuggccuuaugaccauu

SEQ ID NO: 39337 - RNA, 21 nt, RNAi
uucucgaaccggaauacuggu

SEQ ID NO: 39338 - DNA, 21 bp, Homo sapiens
gagcttggccttatgaccagt

SEQ ID NO: 39339 - RNA, 21 nt, RNAi
gcuuggccuuaugaccaguuu

SEQ ID NO: 39340 - RNA, 21 nt, RNAi
uucgaaccggaauacugguca

SEQ ID NO: 39341 - DNA, 21 bp, Homo sapiens
gaggcgccagctcagtttcac

SEQ ID NO: 39342 - RNA, 21 nt, RNAi
ggcgccagcucaguuucacuu

SEQ ID NO: 39343 - RNA, 21 nt, RNAi
uuccgcggucgagucaaagug

SEQ ID NO: 39344 - DNA, 21 bp, Homo sapiens
gaaggtgtctctttcatccat

SEQ ID NO: 39345 - RNA, 21 nt, RNAi
aggugucucuuucauccauuu

SEQ ID NO: 39346 - RNA, 21 nt, RNAi
uuuccacagagaaaguaggua

SEQ ID NO: 39347 - DNA, 21 bp, Homo sapiens
gaggctgaggcaggtggatca

SEQ ID NO: 39348 - RNA, 21 nt, RNAi
ggcugaggcagguggaucauu

SEQ ID NO: 39349 - RNA, 21 nt, RNAi
uuccgacuccguccaccuagu

SEQ ID NO: 39350 - DNA, 21 bp, Homo sapiens
gaggcaggtggatcacgaggt

SEQ ID NO: 39351 - RNA, 21 nt, RNAi
ggcagguggaucacgagguuu

SEQ ID NO: 39352 - RNA, 21 nt, RNAi
uuccguccaccuagugcucca

SEQ ID NO: 39353 - DNA, 21 bp, Homo sapiens
gatcacgaggtcaggagatcg

SEQ ID NO: 39354 - RNA, 21 nt, RNAi
ucacgaggucaggagaucguu

SEQ ID NO: 39355 - RNA, 21 nt, RNAi
uuagugcuccaguccucuagc

SEQ ID NO: 39356 - DNA, 21 bp, Homo sapiens
gaggtcaggagatcgacacca

SEQ ID NO: 39357 - RNA, 21 nt, RNAi
ggucaggagaucgacaccauu

SEQ ID NO: 39358 - RNA, 21 nt, RNAi
uuccaguccucuagcuguggu

SEQ ID NO: 39359 - DNA, 21 bp, Homo sapiens
gagatcgacaccatcctggct

SEQ ID NO: 39360 - RNA, 21 nt, RNAi
gaucgacaccauccuggcuuu

SEQ ID NO: 39361 - RNA, 21 nt, RNAi
uucuagcugugguaggaccga

SEQ ID NO: 39362 - DNA, 21 bp, Homo sapiens
gatcgacaccatcctggctaa

SEQ ID NO: 39363 - RNA, 21 nt, RNAi
ucgacaccauccuggcuaauu

SEQ ID NO: 39364 - RNA, 21 nt, RNAi
uuagcugugguaggaccgauu

SEQ ID NO: 39365 - DNA, 21 bp, Homo sapiens
gacaccatcctggctaacacg

SEQ ID NO: 39366 - RNA, 21 nt, RNAi
caccauccuggcuaacacguu

SEQ ID NO: 39367 - RNA, 21 nt, RNAi
uugugguaggaccgauugugc

SEQ ID NO: 39368 - DNA, 21 bp, Homo sapiens
gaggcagcagactggtgtgaa

SEQ ID NO: 39369 - RNA, 21 nt, RNAi
ggcagcagacuggugugaauu

SEQ ID NO: 39370 - RNA, 21 nt, RNAi
uuccgucgucugaccacacuu

SEQ ID NO: 39371 - DNA, 21 bp, Homo sapiens
gaggtggagcttgcagtgagc

SEQ ID NO: 39372 - RNA, 21 nt, RNAi
gguggagcuugcagugagcuu

SEQ ID NO: 39373 - RNA, 21 nt, RNAi
uuccaccucgaacgucacucg

SEQ ID NO: 39374 - DNA, 21 bp, Homo sapiens
gagcttgcagtgagccgagat

SEQ ID NO: 39375 - RNA, 21 nt, RNAi
gcuugcagugagccgagauuu

SEQ ID NO: 39376 - RNA, 21 nt, RNAi
uucgaacgucacucggcucua

SEQ ID NO: 39377 - DNA, 21 bp, Homo sapiens
gacagagcgagactccatctc

SEQ ID NO: 39378 - RNA, 21 nt, RNAi
cagagcgagacuccaucucuu

SEQ ID NO: 39379 - RNA, 21 nt, RNAi
uugucucgcucugagguagag

SEQ ID NO: 39380 - DNA, 21 bp, Homo sapiens
gagtttctggaaaggtactag

SEQ ID NO: 39381 - RNA, 21 nt, RNAi
guuucuggaaagguacuaguu

SEQ ID NO: 39382 - RNA, 21 nt, RNAi
uucaaagaccuuuccaugauc

SEQ ID NO: 39383 - DNA, 21 bp, Homo sapiens
gaaaggtactaggatttctca

SEQ ID NO: 39384 - RNA, 21 nt, RNAi
aagguacuaggauuucucauu

SEQ ID NO: 39385 - RNA, 21 nt, RNAi
uuuuccaugauccuaaagagu

SEQ ID NO: 39386 - DNA, 21 bp, Homo sapiens
gaaagacagatgtcagactaa

SEQ ID NO: 39387 - RNA, 21 nt, RNAi
aagacagaugucagacuaauu

SEQ ID NO: 39388 - RNA, 21 nt, RNAi
uuuucugucuacagucugauu

SEQ ID NO: 39389 - DNA, 21 bp, Homo sapiens
gacagatgtcagactaatcag

SEQ ID NO: 39390 - RNA, 21 nt, RNAi
cagaugucagacuaaucaguu

SEQ ID NO: 39391 - RNA, 21 nt, RNAi
uugucuacagucugauuaguc

SEQ ID NO: 39392 - DNA, 21 bp, Homo sapiens
gatgtcagactaatcaggctt

SEQ ID NO: 39393 - RNA, 21 nt, RNAi
ugucagacuaaucaggcuuuu

SEQ ID NO: 39394 - RNA, 21 nt, RNAi
uuacagucugauuaguccgaa

SEQ ID NO: 39395 - DNA, 21 bp, Homo sapiens
gactaatcaggcttatccgat

SEQ ID NO: 39396 - RNA, 21 nt, RNAi
cuaaucaggcuuauccgauuu

SEQ ID NO: 39397 - RNA, 21 nt, RNAi
uugauuaguccgaauaggcua

SEQ ID NO: 39398 - DNA, 21 bp, Homo sapiens
gatgtgctacatgagatggaa

SEQ ID NO: 39399 - RNA, 21 nt, RNAi
ugugcuacaugagauggaauu

SEQ ID NO: 39400 - RNA, 21 nt, RNAi
uuacacgauguacucuaccuu

SEQ ID NO: 39401 - DNA, 21 bp, Homo sapiens
gagatggaaatgcgtgtgaaa

SEQ ID NO: 39402 - RNA, 21 nt, RNAi
gauggaaaugcgugugaaauu

SEQ ID NO: 39403 - RNA, 21 nt, RNAi
uucuaccuuuacgcacacuuu

SEQ ID NO: 39404 - DNA, 21 bp, Homo sapiens
gatggaaatgcgtgtgaaata

SEQ ID NO: 39405 - RNA, 21 nt, RNAi
uggaaaugcgugugaaauauu

SEQ ID NO: 39406 - RNA, 21 nt, RNAi
uuaccuuuacgcacacuuuau

SEQ ID NO: 39407 - DNA, 21 bp, Homo sapiens
gaaatgcgtgtgaaatagtaa

SEQ ID NO: 39408 - RNA, 21 nt, RNAi
aaugcgugugaaauaguaauu

SEQ ID NO: 39409 - RNA, 21 nt, RNAi
uuuuacgcacacuuuaucauu

SEQ ID NO: 39410 - DNA, 21 bp, Homo sapiens
gaaatagtaagtcacactaag

SEQ ID NO: 39411 - RNA, 21 nt, RNAi
aauaguaagucacacuaaguu

SEQ ID NO: 39412 - RNA, 21 nt, RNAi
uuuuaucauucagugugauuc

SEQ ID NO: 39413 - DNA, 21 bp, Homo sapiens
gatatgaatgttgcagaaact

SEQ ID NO: 39414 - RNA, 21 nt, RNAi
uaugaauguugcagaaacuuu

SEQ ID NO: 39415 - RNA, 21 nt, RNAi
uuauacuuacaacgucuuuga

SEQ ID NO: 39416 - DNA, 21 bp, Homo sapiens
gaatgttgcagaaactctata

SEQ ID NO: 39417 - RNA, 21 nt, RNAi
auguugcagaaacucuauauu

SEQ ID NO: 39418 - RNA, 21 nt, RNAi
uuuacaacgucuuugagauau

SEQ ID NO: 39419 - DNA, 21 bp, Homo sapiens
taaggtgatttctcgagacaa

SEQ ID NO: 39420 - RNA, 21 nt, RNAi
aggugauuucucgagacaauu

SEQ ID NO: 39421 - RNA, 21 nt, RNAi
uuuccacuaaagagcucuguu

SEQ ID NO: 39422 - DNA, 21 bp, Homo sapiens
tacatcatcacggagctcatg

SEQ ID NO: 39423 - RNA, 21 nt, RNAi
caucaucacggagcucauguu

SEQ ID NO: 39424 - RNA, 21 nt, RNAi
uuguaguagugccucgaguac

SEQ ID NO: 39425 - DNA, 21 bp, Homo sapiens
tacctggagtcgcagaattac

SEQ ID NO: 39426 - RNA, 21 nt, RNAi
ccuggagucgcagaauuacuu

SEQ ID NO: 39427 - RNA, 21 nt, RNAi
uuggaccucagcgucuuaaug

SEQ ID NO: 39428 - DNA, 21 bp, Homo sapiens
tagccaggcttatcaaggagg

SEQ ID NO: 39429 - RNA, 21 nt, RNAi
gccaggcuuaucaaggagguu

SEQ ID NO: 39430 - RNA, 21 nt, RNAi
uucgguccgaauaguuccucc

SEQ ID NO: 39431 - DNA, 21 bp, Homo sapiens
tatcaaggaggacgtctacct

SEQ ID NO: 39432 - RNA, 21 nt, RNAi
ucaaggaggacgucuaccuuu

SEQ ID NO: 39433 - RNA, 21 nt, RNAi
uuaguuccuccugcagaugga

SEQ ID NO: 39434 - DNA, 21 bp, Homo sapiens
tactccaccaaatccgacgtc

SEQ ID NO: 39435 - RNA, 21 nt, RNAi
cuccaccaaauccgacgucuu

SEQ ID NO: 39436 - RNA, 21 nt, RNAi
uugaggugguuuaggcugcag

SEQ ID NO: 39437 - DNA, 21 bp, Homo sapiens
tacacgcgtgtgctcctctcc

SEQ ID NO: 39438 - RNA, 21 nt, RNAi
cacgcgugugcuccucuccuu

SEQ ID NO: 39439 - RNA, 21 nt, RNAi
uugugcgcacacgaggagagg

SEQ ID NO: 39440 - DNA, 21 bp, Homo sapiens
tactccatcgtgtgtgccttg

SEQ ID NO: 39441 - RNA, 21 nt, RNAi
cuccaucgugugugccuuguu

SEQ ID NO: 39442 - RNA, 21 nt, RNAi
uugagguagcacacacggaac

SEQ ID NO: 39443 - DNA, 21 bp, Homo sapiens
tatgaccagtgagaactctct

SEQ ID NO: 39444 - RNA, 21 nt, RNAi
ugaccagugagaacucucuuu

SEQ ID NO: 39445 - RNA, 21 nt, RNAi
uuacuggucacucuugagaga

SEQ ID NO: 39446 - DNA, 21 bp, Homo sapiens
taatcaggcttatccgatgtg

SEQ ID NO: 39447 - RNA, 21 nt, RNAi
aucaggcuuauccgauguguu

SEQ ID NO: 39448 - RNA, 21 nt, RNAi
uuuaguccgaauaggcuacac

SEQ ID NO: 39449 - DNA, 21 bp, Homo sapiens
tatccgatgtgctacatgaga

SEQ ID NO: 39450 - RNA, 21 nt, RNAi
uccgaugugcuacaugagauu

SEQ ID NO: 39451 - RNA, 21 nt, RNAi
uuaggcuacacgauguacucu

SEQ ID NO: 39452 - DNA, 21 bp, Homo sapiens
tacatgagatggaaatgcgtg

SEQ ID NO: 39453 - RNA, 21 nt, RNAi
caugagauggaaaugcguguu

SEQ ID NO: 39454 - RNA, 21 nt, RNAi
uuguacucuaccuuuacgcac

SEQ ID NO: 39455 - DNA, 21 bp, Homo sapiens
tagtaagtcacactaagtctt

SEQ ID NO: 39456 - RNA, 21 nt, RNAi
guaagucacacuaagucuuuu

SEQ ID NO: 39457 - RNA, 21 nt, RNAi
uucauucagugugauucagaa

SEQ ID NO: 39458 - DNA, 21 bp, Homo sapiens
taagtcacactaagtcttctg

SEQ ID NO: 39459 - RNA, 21 nt, RNAi
agucacacuaagucuucuguu

SEQ ID NO: 39460 - RNA, 21 nt, RNAi
uuucagugugauucagaagac

SEQ ID NO: 39461 - DNA, 21 bp, Homo sapiens
taagtcttctggaggttctat

SEQ ID NO: 39462 - RNA, 21 nt, RNAi
agucuucuggagguucuauuu

SEQ ID NO: 39463 - RNA, 21 nt, RNAi
uuucagaagaccuccaagaua

SEQ ID NO: 39464 - DNA, 21 bp, Homo sapiens
tatgaatgttgcagaaactct

SEQ ID NO: 39465 - RNA, 21 nt, RNAi
ugaauguugcagaaacucuuu

SEQ ID NO: 39466 - RNA, 21 nt, RNAi
uuacuuacaacgucuuugaga

SEQ ID NO: 39467 - DNA, 21 bp, Homo sapiens
aaggtgatttctcgagacaac

SEQ ID NO: 39468 - RNA, 21 nt, RNAi
ggugauuucucgagacaacuu

SEQ ID NO: 39469 - RNA, 21 nt, RNAi
uuccacuaaagagcucuguug

SEQ ID NO: 39470 - DNA, 21 bp, Homo sapiens
caggtggccattaaggtgatt

SEQ ID NO: 39471 - RNA, 21 nt, RNAi
gguggccauuaaggugauuuu

SEQ ID NO: 39472 - RNA, 21 nt, RNAi
uuccaccgguaauuccacuaa

SEQ ID NO: 39473 - DNA, 21 bp, Homo sapiens
caggcttatcaaggaggacgt

SEQ ID NO: 39474 - RNA, 21 nt, RNAi
ggcuuaucaaggaggacguuu

SEQ ID NO: 39475 - RNA, 21 nt, RNAi
uuccgaauaguuccuccugca

SEQ ID NO: 39476 - DNA, 21 bp, Homo sapiens
cattactccaccaaatccgac

SEQ ID NO: 39477 - RNA, 21 nt, RNAi
uuacuccaccaaauccgacuu

SEQ ID NO: 39478 - RNA, 21 nt, RNAi
uuaaugaggugguuuaggcug

SEQ ID NO: 39479 - DNA, 21 bp, Homo sapiens
caaatccgacgtctggtcctt

SEQ ID NO: 39480 - RNA, 21 nt, RNAi
aauccgacgucugguccuuuu

SEQ ID NO: 39481 - RNA, 21 nt, RNAi
uuuuaggcugcagaccaggaa

SEQ ID NO: 39482 - DNA, 21 bp, Homo sapiens
gagcttgtgaactaccacagg

SEQ ID NO: 39483 - RNA, 21 nt, RNAi
gcuugugaacuaccacagguu

SEQ ID NO: 39484 - RNA, 21 nt, RNAi
uucgaacacuugauggugucc

SEQ ID NO: 39485 - DNA, 21 bp, Homo sapiens
gaagctgcggcacaaacacat

SEQ ID NO: 39486 - RNA, 21 nt, RNAi
agcugcggcacaaacacauuu

SEQ ID NO: 39487 - RNA, 21 nt, RNAi
uuucgacgccguguuugugua

SEQ ID NO: 39488 - DNA, 21 bp, Homo sapiens
gagtcgcagaattacatccac

SEQ ID NO: 39489 - RNA, 21 nt, RNAi
gucgcagaauuacauccacuu

SEQ ID NO: 39490 - RNA, 21 nt, RNAi
uucagcgucuuaauguaggug

SEQ ID NO: 39491 - DNA, 21 bp, Homo sapiens
gaggccattactccaccaaat

SEQ ID NO: 39492 - RNA, 21 nt, RNAi
ggccauuacuccaccaaauuu

SEQ ID NO: 39493 - RNA, 21 nt, RNAi
uuccgguaaugaggugguuua

SEQ ID NO: 39494 - DNA, 21 bp, Homo sapiens
tacctggagtcgcagaattac

SEQ ID NO: 39495 - RNA, 21 nt, RNAi
ccuggagucgcagaauuacuu

SEQ ID NO: 39496 - RNA, 21 nt, RNAi
uuggaccucagcgucuuaaug

SEQ ID NO: 39497 - DNA, 21 bp, Homo sapiens
aaactcgccgacctgcgctac

SEQ ID NO: 39498 - RNA, 21 nt, RNAi
acucgccgaccugcgcuacuu

SEQ ID NO: 39499 - RNA, 21 nt, RNAi
uuugagcggcuggacgcgaug

SEQ ID NO: 39500 - DNA, 21 bp, Homo sapiens
aagcacctgcacatccacact

SEQ ID NO: 39501 - RNA, 21 nt, RNAi
gcaccugcacauccacacuuu

SEQ ID NO: 39502 - RNA, 21 nt, RNAi
uucguggacguguagguguga

SEQ ID NO: 39503 - DNA, 21 bp, Homo sapiens
aaagaaaggatgtcttaagag

SEQ ID NO: 39504 - RNA, 21 nt, RNAi
agaaaggaugucuuaagaguu

SEQ ID NO: 39505 - RNA, 21 nt, RNAi
uuucuuuccuacagaauucuc

SEQ ID NO: 39506 - DNA, 21 bp, Homo sapiens
aagaaaggatgtcttaagaga

SEQ ID NO: 39507 - RNA, 21 nt, RNAi
gaaaggaugucuuaagagauu

SEQ ID NO: 39508 - RNA, 21 nt, RNAi
uucuuuccuacagaauucucu

SEQ ID NO: 39509 - DNA, 21 bp, Homo sapiens
aaaggatgtcttaagagaagc

SEQ ID NO: 39510 - RNA, 21 nt, RNAi
aggaugucuuaagagaagcuu

SEQ ID NO: 39511 - RNA, 21 nt, RNAi
uuuccuacagaauucucuucg

SEQ ID NO: 39512 - DNA, 21 bp, Homo sapiens
aaggatgtcttaagagaagct

SEQ ID NO: 39513 - RNA, 21 nt, RNAi
ggaugucuuaagagaagcuuu

SEQ ID NO: 39514 - RNA, 21 nt, RNAi
uuccuacagaauucucuucga

SEQ ID NO: 39515 - DNA, 21 bp, Homo sapiens
aatttgcaatgagcctgaatt

SEQ ID NO: 39516 - RNA, 21 nt, RNAi
uuugcaaugagccugaauuuu

SEQ ID NO: 39517 - RNA, 21 nt, RNAi
uuaaacguuacucggacuuaa

SEQ ID NO: 39518 - DNA, 21 bp, Homo sapiens
aatagttactgaatacatgcc

SEQ ID NO: 39519 - RNA, 21 nt, RNAi
uaguuacugaauacaugccuu

SEQ ID NO: 39520 - RNA, 21 nt, RNAi
uuaucaaugacuuauguacgg

SEQ ID NO: 39521 - DNA, 21 bp, Homo sapiens
aatacatgccaaatggatcat

SEQ ID NO: 39522 - RNA, 21 nt, RNAi
uacaugccaaauggaucauuu

SEQ ID NO: 39523 - RNA, 21 nt, RNAi
uuauguacgguuuaccuagua

SEQ ID NO: 39524 - DNA, 21 bp, Homo sapiens
aaatgaactcctacataggaa

SEQ ID NO: 39525 - RNA, 21 nt, RNAi
augaacuccuacauaggaauu

SEQ ID NO: 39526 - RNA, 21 nt, RNAi
uuuacuugaggauguauccuu

SEQ ID NO: 39527 - DNA, 21 bp, Homo sapiens
aatgaactcctacataggaaa

SEQ ID NO: 39528 - RNA, 21 nt, RNAi
ugaacuccuacauaggaaauu

SEQ ID NO: 39529 - RNA, 21 nt, RNAi
uuacuugaggauguauccuuu

SEQ ID NO: 39530 - DNA, 21 bp, Homo sapiens
aaactgaatatcctgatgttg

SEQ ID NO: 39531 - RNA, 21 nt, RNAi
acugaauauccugauguuguu

SEQ ID NO: 39532 - RNA, 21 nt, RNAi
uuugacuuauaggacuacaac

SEQ ID NO: 39533 - DNA, 21 bp, Homo sapiens
aactgaatatcctgatgttgc

SEQ ID NO: 39534 - RNA, 21 nt, RNAi
cugaauauccugauguugcuu

SEQ ID NO: 39535 - RNA, 21 nt, RNAi
uugacuuauaggacuacaacg

SEQ ID NO: 39536 - DNA, 21 bp, Homo sapiens
aatatcctgatgttgcttggc

SEQ ID NO: 39537 - RNA, 21 nt, RNAi
uauccugauguugcuuggcuu

SEQ ID NO: 39538 - RNA, 21 nt, RNAi
uuauaggacuacaacgaaccg

SEQ ID NO: 39539 - DNA, 21 bp, Homo sapiens
aaattacctgcacaatatgac

SEQ ID NO: 39540 - RNA, 21 nt, RNAi
auuaccugcacaauaugacuu

SEQ ID NO: 39541 - RNA, 21 nt, RNAi
uuuaauggacguguuauacug

SEQ ID NO: 39542 - DNA, 21 bp, Homo sapiens
aattacctgcacaatatgact

SEQ ID NO: 39543 - RNA, 21 nt, RNAi
uuaccugcacaauaugacuuu

SEQ ID NO: 39544 - RNA, 21 nt, RNAi
uuaauggacguguuauacuga

SEQ ID NO: 39545 - DNA, 21 bp, Homo sapiens
aatatgactcctcctttactt

SEQ ID NO: 39546 - RNA, 21 nt, RNAi
uaugacuccuccuuuacuuuu

SEQ ID NO: 39547 - RNA, 21 nt, RNAi
uuauacugaggaggaaaugaa

SEQ ID NO: 39548 - DNA, 21 bp, Homo sapiens
aagtagcaaatctgcaccaga

SEQ ID NO: 39549 - RNA, 21 nt, RNAi
guagcaaaucugcaccagauu

SEQ ID NO: 39550 - RNA, 21 nt, RNAi
uucaucguuuagacguggucu

SEQ ID NO: 39551 - DNA, 21 bp, Homo sapiens
aattatctatatgccacctga

SEQ ID NO: 39552 - RNA, 21 nt, RNAi
uuaucuauaugccaccugauu

SEQ ID NO: 39553 - RNA, 21 nt, RNAi
uuaauagauauacgguggacu

SEQ ID NO: 39554 - DNA, 21 bp, Homo sapiens
aagatgtcaccaatcctttgc

SEQ ID NO: 39555 - RNA, 21 nt, RNAi
gaugucaccaauccuuugcuu

SEQ ID NO: 39556 - RNA, 21 nt, RNAi
uucuacagugguuaggaaacg

SEQ ID NO: 39557 - DNA, 21 bp, Homo sapiens
aatgtatagtgtgtcacaagg

SEQ ID NO: 39558 - RNA, 21 nt, RNAi
uguauagugugucacaagguu

SEQ ID NO: 39559 - RNA, 21 nt, RNAi
uuacauaucacacaguguucc

SEQ ID NO: 39560 - DNA, 21 bp, Homo sapiens
aaggacatcgacctgttatta

SEQ ID NO: 39561 - RNA, 21 nt, RNAi
ggacaucgaccuguuauuauu

SEQ ID NO: 39562 - RNA, 21 nt, RNAi
uuccuguagcuggacaauaau

SEQ ID NO: 39563 - DNA, 21 bp, Homo sapiens
aagtttgccatatgatatacc

SEQ ID NO: 39564 - RNA, 21 nt, RNAi
guuugccauaugauauaccuu

SEQ ID NO: 39565 - RNA, 21 nt, RNAi
uucaaacgguauacuauaugg

SEQ ID NO: 39566 - DNA, 21 bp, Homo sapiens
aaatccagatgaaagaccatc

SEQ ID NO: 39567 - RNA, 21 nt, RNAi
auccagaugaaagaccaucuu

SEQ ID NO: 39568 - RNA, 21 nt, RNAi
uuuaggucuacuuucugguag

SEQ ID NO: 39569 - DNA, 21 bp, Homo sapiens
aatccagatgaaagaccatct

SEQ ID NO: 39570 - RNA, 21 nt, RNAi
uccagaugaaagaccaucuuu

SEQ ID NO: 39571 - RNA, 21 nt, RNAi
uuaggucuacuuucugguaga

SEQ ID NO: 39572 - DNA, 21 bp, Homo sapiens
aagctgttattcagctaaaga

SEQ ID NO: 39573 - RNA, 21 nt, RNAi
gcuguuauucagcuaaagauu

SEQ ID NO: 39574 - RNA, 21 nt, RNAi
uucgacaauaagucgauuucu

SEQ ID NO: 39575 - DNA, 21 bp, Homo sapiens
aacaaagttacagagtgtttc

SEQ ID NO: 39576 - RNA, 21 nt, RNAi
caaaguuacagaguguuucuu

SEQ ID NO: 39577 - RNA, 21 nt, RNAi
uuguuucaaugucucacaaag

SEQ ID NO: 39578 - DNA, 21 bp, Homo sapiens
aaagttacagagtgtttcaag

SEQ ID NO: 39579 - RNA, 21 nt, RNAi
aguuacagaguguuucaaguu

SEQ ID NO: 39580 - RNA, 21 nt, RNAi
uuucaaugucucacaaaguuc

SEQ ID NO: 39581 - DNA, 21 bp, Homo sapiens
aagttacagagtgtttcaagt

SEQ ID NO: 39582 - RNA, 21 nt, RNAi
guuacagaguguuucaaguuu

SEQ ID NO: 39583 - RNA, 21 nt, RNAi
uucaaugucucacaaaguuca

SEQ ID NO: 39584 - DNA, 21 bp, Homo sapiens
aagtgccattcacctatgtga

SEQ ID NO: 39585 - RNA, 21 nt, RNAi
gugccauucaccuaugugauu

SEQ ID NO: 39586 - RNA, 21 nt, RNAi
uucacgguaaguggauacacu

SEQ ID NO: 39587 - DNA, 21 bp, Homo sapiens
aattatctctgaacatacctg

SEQ ID NO: 39588 - RNA, 21 nt, RNAi
uuaucucugaacauaccuguu

SEQ ID NO: 39589 - RNA, 21 nt, RNAi
uuaauagagacuuguauggac

SEQ ID NO: 39590 - DNA, 21 bp, Homo sapiens
aacatacctgtaaatcatggt

SEQ ID NO: 39591 - RNA, 21 nt, RNAi
cauaccuguaaaucaugguuu

SEQ ID NO: 39592 - RNA, 21 nt, RNAi
uuguauggacauuuaguacca

SEQ ID NO: 39593 - DNA, 21 bp, Homo sapiens
aaatcatggtccacaagagga

SEQ ID NO: 39594 - RNA, 21 nt, RNAi
aucaugguccacaagaggauu

SEQ ID NO: 39595 - RNA, 21 nt, RNAi
uuuaguaccagguguucuccu

SEQ ID NO: 39596 - DNA, 21 bp, Homo sapiens
aatcatggtccacaagaggaa

SEQ ID NO: 39597 - RNA, 21 nt, RNAi
ucaugguccacaagaggaauu

SEQ ID NO: 39598 - RNA, 21 nt, RNAi
uuaguaccagguguucuccuu

SEQ ID NO: 39599 - DNA, 21 bp, Homo sapiens
aagaggaatcatgtggatcct

SEQ ID NO: 39600 - RNA, 21 nt, RNAi
gaggaaucauguggauccuuu

SEQ ID NO: 39601 - RNA, 21 nt, RNAi
uucuccuuaguacaccuagga

SEQ ID NO: 39602 - DNA, 21 bp, Homo sapiens
aatcatgtggatcctctcagc

SEQ ID NO: 39603 - RNA, 21 nt, RNAi
ucauguggauccucucagcuu

SEQ ID NO: 39604 - RNA, 21 nt, RNAi
uuaguacaccuaggagagucg

SEQ ID NO: 39605 - DNA, 21 bp, Homo sapiens
aaatagtggttctcctgaaac

SEQ ID NO: 39606 - RNA, 21 nt, RNAi
auagugguucuccugaaacuu

SEQ ID NO: 39607 - RNA, 21 nt, RNAi
uuuaucaccaagaggacuuug

SEQ ID NO: 39608 - DNA, 21 bp, Homo sapiens
aatagtggttctcctgaaact

SEQ ID NO: 39609 - RNA, 21 nt, RNAi
uagugguucuccugaaacuuu

SEQ ID NO: 39610 - RNA, 21 nt, RNAi
uuaucaccaagaggacuuuga

SEQ ID NO: 39611 - DNA, 21 bp, Homo sapiens
aagctgcatcactgtcctgga

SEQ ID NO: 39612 - RNA, 21 nt, RNAi
gcugcaucacuguccuggauu

SEQ ID NO: 39613 - RNA, 21 nt, RNAi
uucgacguagugacaggaccu

SEQ ID NO: 39614 - DNA, 21 bp, Homo sapiens
aagaccactccatgctcttca

SEQ ID NO: 39615 - RNA, 21 nt, RNAi
gaccacuccaugcucuucauu

SEQ ID NO: 39616 - RNA, 21 nt, RNAi
uucuggugagguacgagaagu

SEQ ID NO: 39617 - DNA, 21 bp, Homo sapiens
aataaatccactctcaactgc

SEQ ID NO: 39618 - RNA, 21 nt, RNAi
uaaauccacucucaacugcuu

SEQ ID NO: 39619 - RNA, 21 nt, RNAi
uuauuuaggugagaguugacg

SEQ ID NO: 39620 - DNA, 21 bp, Homo sapiens
aaatccactctcaactgcagg

SEQ ID NO: 39621 - RNA, 21 nt, RNAi
auccacucucaacugcagguu

SEQ ID NO: 39622 - RNA, 21 nt, RNAi
uuuaggugagaguugacgucc

SEQ ID NO: 39623 - DNA, 21 bp, Homo sapiens
aatccactctcaactgcagga

SEQ ID NO: 39624 - RNA, 21 nt, RNAi
uccacucucaacugcaggauu

SEQ ID NO: 39625 - RNA, 21 nt, RNAi
uuaggugagaguugacguccu

SEQ ID NO: 39626 - DNA, 21 bp, Homo sapiens
aactgcaggaaactcagaacg

SEQ ID NO: 39627 - RNA, 21 nt, RNAi
cugcaggaaacucagaacguu

SEQ ID NO: 39628 - RNA, 21 nt, RNAi
uugacguccuuugagucuugc

SEQ ID NO: 39629 - DNA, 21 bp, Homo sapiens
aaactcagaacgtctgcagcc

SEQ ID NO: 39630 - RNA, 21 nt, RNAi
acucagaacgucugcagccuu

SEQ ID NO: 39631 - RNA, 21 nt, RNAi
uuugagucuugcagacgucgg

SEQ ID NO: 39632 - DNA, 21 bp, Homo sapiens
aactcagaacgtctgcagcct

SEQ ID NO: 39633 - RNA, 21 nt, RNAi
cucagaacgucugcagccuuu

SEQ ID NO: 39634 - RNA, 21 nt, RNAi
uugagucuugcagacgucgga

SEQ ID NO: 39635 - DNA, 21 bp, Homo sapiens
aacgtctgcagcctggtatag

SEQ ID NO: 39636 - RNA, 21 nt, RNAi
cgucugcagccugguauaguu

SEQ ID NO: 39637 - RNA, 21 nt, RNAi
uugcagacgucggaccauauc

SEQ ID NO: 39638 - DNA, 21 bp, Homo sapiens
aagacattgtgaaccaaatga

SEQ ID NO: 39639 - RNA, 21 nt, RNAi
gacauugugaaccaaaugauu

SEQ ID NO: 39640 - RNA, 21 nt, RNAi
uucuguaacacuugguuuacu

SEQ ID NO: 39641 - DNA, 21 bp, Homo sapiens
aaccaaatgacagaagcctgc

SEQ ID NO: 39642 - RNA, 21 nt, RNAi
ccaaaugacagaagccugcuu

SEQ ID NO: 39643 - RNA, 21 nt, RNAi
uugguuuacugucuucggacg

SEQ ID NO: 39644 - DNA, 21 bp, Homo sapiens
aaatgacagaagcctgcctta

SEQ ID NO: 39645 - RNA, 21 nt, RNAi
augacagaagccugccuuauu

SEQ ID NO: 39646 - RNA, 21 nt, RNAi
uuuacugucuucggacggaau

SEQ ID NO: 39647 - DNA, 21 bp, Homo sapiens
aatgacagaagcctgccttaa

SEQ ID NO: 39648 - RNA, 21 nt, RNAi
ugacagaagccugccuuaauu

SEQ ID NO: 39649 - RNA, 21 nt, RNAi
uuacugucuucggacggaauu

SEQ ID NO: 39650 - DNA, 21 bp, Homo sapiens
aagcctgccttaaccagtcgc

SEQ ID NO: 39651 - RNA, 21 nt, RNAi
gccugccuuaaccagucgcuu

SEQ ID NO: 39652 - RNA, 21 nt, RNAi
uucggacggaauuggucagcg

SEQ ID NO: 39653 - DNA, 21 bp, Homo sapiens
aaagaggactatgaacttgtt

SEQ ID NO: 39654 - RNA, 21 nt, RNAi
agaggacuaugaacuuguuuu

SEQ ID NO: 39655 - RNA, 21 nt, RNAi
uuucuccugauacuugaacaa

SEQ ID NO: 39656 - DNA, 21 bp, Homo sapiens
aagaggactatgaacttgtta

SEQ ID NO: 39657 - RNA, 21 nt, RNAi
gaggacuaugaacuuguuauu

SEQ ID NO: 39658 - RNA, 21 nt, RNAi
uucuccugauacuugaacaau

SEQ ID NO: 39659 - DNA, 21 bp, Homo sapiens
aacttgttagtaccaagccta

SEQ ID NO: 39660 - RNA, 21 nt, RNAi
cuuguuaguaccaagccuauu

SEQ ID NO: 39661 - RNA, 21 nt, RNAi
uugaacaaucaugguucggau

SEQ ID NO: 39662 - DNA, 21 bp, Homo sapiens
aaagtcagacaattactagac

SEQ ID NO: 39663 - RNA, 21 nt, RNAi
agucagacaauuacuagacuu

SEQ ID NO: 39664 - RNA, 21 nt, RNAi
uuucagucuguuaaugaucug

SEQ ID NO: 39665 - DNA, 21 bp, Homo sapiens
aagtcagacaattactagaca

SEQ ID NO: 39666 - RNA, 21 nt, RNAi
gucagacaauuacuagacauu

SEQ ID NO: 39667 - RNA, 21 nt, RNAi
uucagucuguuaaugaucugu

SEQ ID NO: 39668 - DNA, 21 bp, Homo sapiens
aattactagacactactgaca

SEQ ID NO: 39669 - RNA, 21 nt, RNAi
uuacuagacacuacugacauu

SEQ ID NO: 39670 - RNA, 21 nt, RNAi
uuaaugaucugugaugacugu

SEQ ID NO: 39671 - DNA, 21 bp, Homo sapiens
aaggagaagaatttgccaaag

SEQ ID NO: 39672 - RNA, 21 nt, RNAi
ggagaagaauuugccaaaguu

SEQ ID NO: 39673 - RNA, 21 nt, RNAi
uuccucuucuuaaacgguuuc

SEQ ID NO: 39674 - DNA, 21 bp, Homo sapiens
aatacttgtggtttctagatc

SEQ ID NO: 39675 - RNA, 21 nt, RNAi
uacuugugguuucuagaucuu

SEQ ID NO: 39676 - RNA, 21 nt, RNAi
uuaugaacaccaaagaucuag

SEQ ID NO: 39677 - DNA, 21 bp, Homo sapiens
aaagcatgtaagtgactgttt

SEQ ID NO: 39678 - RNA, 21 nt, RNAi
agcauguaagugacuguuuuu

SEQ ID NO: 39679 - RNA, 21 nt, RNAi
uuucguacauucacugacaaa

SEQ ID NO: 39680 - DNA, 21 bp, Homo sapiens
cagctctggttcggagaagca

SEQ ID NO: 39681 - RNA, 21 nt, RNAi
gcucugguucggagaagcauu

SEQ ID NO: 39682 - RNA, 21 nt, RNAi
uucgagaccaagccucuucgu

SEQ ID NO: 39683 - DNA, 21 bp, Homo sapiens
caaactcgccgacctgcgcta

SEQ ID NO: 39684 - RNA, 21 nt, RNAi
aacucgccgaccugcgcuauu

SEQ ID NO: 39685 - RNA, 21 nt, RNAi
uuuugagcggcuggacgcgau

SEQ ID NO: 39686 - DNA, 21 bp, Homo sapiens
cacctgcacatccacactccg

SEQ ID NO: 39687 - RNA, 21 nt, RNAi
ccugcacauccacacuccguu

SEQ ID NO: 39688 - RNA, 21 nt, RNAi
uuggacguguaggugugaggc

SEQ ID NO: 39689 - DNA, 21 bp, Homo sapiens
cacatccacactccgctgctc

SEQ ID NO: 39690 - RNA, 21 nt, RNAi
cauccacacuccgcugcucuu

SEQ ID NO: 39691 - RNA, 21 nt, RNAi
uuguaggugugaggcgacgag

SEQ ID NO: 39692 - DNA, 21 bp, Homo sapiens
catccacactccgctgctcga

SEQ ID NO: 39693 - RNA, 21 nt, RNAi
uccacacuccgcugcucgauu

SEQ ID NO: 39694 - RNA, 21 nt, RNAi
uuaggugugaggcgacgagcu

SEQ ID NO: 39695 - DNA, 21 bp, Homo sapiens
cacactccgctgctcgacagt

SEQ ID NO: 39696 - RNA, 21 nt, RNAi
cacuccgcugcucgacaguuu

SEQ ID NO: 39697 - RNA, 21 nt, RNAi
uugugaggcgacgagcuguca

SEQ ID NO: 39698 - DNA, 21 bp, Homo sapiens
cactccgctgctcgacagtga

SEQ ID NO: 39699 - RNA, 21 nt, RNAi
cuccgcugcucgacagugauu

SEQ ID NO: 39700 - RNA, 21 nt, RNAi
uugaggcgacgagcugucacu

SEQ ID NO: 39701 - DNA, 21 bp, Homo sapiens
cagtgaaagaaaggatgtctt

SEQ ID NO: 39702 - RNA, 21 nt, RNAi
gugaaagaaaggaugucuuuu

SEQ ID NO: 39703 - RNA, 21 nt, RNAi
uucacuuucuuuccuacagaa

SEQ ID NO: 39704 - DNA, 21 bp, Homo sapiens
cacaaagctagatttagttac

SEQ ID NO: 39705 - RNA, 21 nt, RNAi
caaagcuagauuuaguuacuu

SEQ ID NO: 39706 - RNA, 21 nt, RNAi
uuguuucgaucuaaaucaaug

SEQ ID NO: 39707 - DNA, 21 bp, Homo sapiens
catgccaaatggatcattaaa

SEQ ID NO: 39708 - RNA, 21 nt, RNAi
ugccaaauggaucauuaaauu

SEQ ID NO: 39709 - RNA, 21 nt, RNAi
uuacgguuuaccuaguaauuu

SEQ ID NO: 39710 - DNA, 21 bp, Homo sapiens
cattgagatttcgcatcctgc

SEQ ID NO: 39711 - RNA, 21 nt, RNAi
uugagauuucgcauccugcuu

SEQ ID NO: 39712 - RNA, 21 nt, RNAi
uuaacucuaaagcguaggacg

SEQ ID NO: 39713 - DNA, 21 bp, Homo sapiens
cacaatatgactcctccttta

SEQ ID NO: 39714 - RNA, 21 nt, RNAi
caauaugacuccuccuuuauu

SEQ ID NO: 39715 - RNA, 21 nt, RNAi
uuguuauacugaggaggaaau

SEQ ID NO: 39716 - DNA, 21 bp, Homo sapiens
caatatgactcctcctttact

SEQ ID NO: 39717 - RNA, 21 nt, RNAi
auaugacuccuccuuuacuuu

SEQ ID NO: 39718 - RNA, 21 nt, RNAi
uuuauacugaggaggaaauga

SEQ ID NO: 39719 - DNA, 21 bp, Homo sapiens
catcatgacttgaagactcag

SEQ ID NO: 39720 - RNA, 21 nt, RNAi
ucaugacuugaagacucaguu

SEQ ID NO: 39721 - RNA, 21 nt, RNAi
uuaguacugaacuucugaguc

SEQ ID NO: 39722 - DNA, 21 bp, Homo sapiens
catgacttgaagactcagaat

SEQ ID NO: 39723 - RNA, 21 nt, RNAi
ugacuugaagacucagaauuu

SEQ ID NO: 39724 - RNA, 21 nt, RNAi
uuacugaacuucugagucuua

SEQ ID NO: 39725 - DNA, 21 bp, Homo sapiens
cacagtcacgaagtagcaaat

SEQ ID NO: 39726 - RNA, 21 nt, RNAi
cagucacgaaguagcaaauuu

SEQ ID NO: 39727 - RNA, 21 nt, RNAi
uugucagugcuucaucguuua

SEQ ID NO: 39728 - DNA, 21 bp, Homo sapiens
cagtcacgaagtagcaaatct

SEQ ID NO: 39729 - RNA, 21 nt, RNAi
gucacgaaguagcaaaucuuu

SEQ ID NO: 39730 - RNA, 21 nt, RNAi
uucagugcuucaucguuuaga

SEQ ID NO: 39731 - DNA, 21 bp, Homo sapiens
cacgaagtagcaaatctgcac

SEQ ID NO: 39732 - RNA, 21 nt, RNAi
cgaaguagcaaaucugcacuu

SEQ ID NO: 39733 - RNA, 21 nt, RNAi
uugcuucaucguuuagacgug

SEQ ID NO: 39734 - DNA, 21 bp, Homo sapiens
caaatctgcaccagaaggagg

SEQ ID NO: 39735 - RNA, 21 nt, RNAi
aaucugcaccagaaggagguu

SEQ ID NO: 39736 - RNA, 21 nt, RNAi
uuuuagacguggucuuccucc

SEQ ID NO: 39737 - DNA, 21 bp, Homo sapiens
caattatctatatgccacctg

SEQ ID NO: 39738 - RNA, 21 nt, RNAi
auuaucuauaugccaccuguu

SEQ ID NO: 39739 - RNA, 21 nt, RNAi
uuuaauagauauacgguggac

SEQ ID NO: 39740 - DNA, 21 bp, Homo sapiens
cagtatcaagcacgatatata

SEQ ID NO: 39741 - RNA, 21 nt, RNAi
guaucaagcacgauauauauu

SEQ ID NO: 39742 - RNA, 21 nt, RNAi
uucauaguucgugcuauauau

SEQ ID NO: 39743 - DNA, 21 bp, Homo sapiens
caagcacgatatatatagcta

SEQ ID NO: 39744 - RNA, 21 nt, RNAi
agcacgauauauauagcuauu

SEQ ID NO: 39745 - RNA, 21 nt, RNAi
uuucgugcuauauauaucgau

SEQ ID NO: 39746 - DNA, 21 bp, Homo sapiens
cacgatatatatagctatgca

SEQ ID NO: 39747 - RNA, 21 nt, RNAi
cgauauauauagcuaugcauu

SEQ ID NO: 39748 - RNA, 21 nt, RNAi
uugcuauauauaucgauacgu

SEQ ID NO: 39749 - DNA, 21 bp, Homo sapiens
caccaatcctttgcagataat

SEQ ID NO: 39750 - RNA, 21 nt, RNAi
ccaauccuuugcagauaauuu

SEQ ID NO: 39751 - RNA, 21 nt, RNAi
uugguuaggaaacgucuauua

SEQ ID NO: 39752 - DNA, 21 bp, Homo sapiens
caatcctttgcagataatgta

SEQ ID NO: 39753 - RNA, 21 nt, RNAi
auccuuugcagauaauguauu

SEQ ID NO: 39754 - RNA, 21 nt, RNAi
uuuaggaaacgucuauuacau

SEQ ID NO: 39755 - DNA, 21 bp, Homo sapiens
cagataatgtatagtgtgtca

SEQ ID NO: 39756 - RNA, 21 nt, RNAi
gauaauguauagugugucauu

SEQ ID NO: 39757 - RNA, 21 nt, RNAi
uucuauuacauaucacacagu

SEQ ID NO: 39758 - DNA, 21 bp, Homo sapiens
cacaaggacatcgacctgtta

SEQ ID NO: 39759 - RNA, 21 nt, RNAi
caaggacaucgaccuguuauu

SEQ ID NO: 39760 - RNA, 21 nt, RNAi
uuguuccuguagcuggacaau

SEQ ID NO: 39761 - DNA, 21 bp, Homo sapiens
caaggacatcgacctgttatt

SEQ ID NO: 39762 - RNA, 21 nt, RNAi
aggacaucgaccuguuauuuu

SEQ ID NO: 39763 - RNA, 21 nt, RNAi
uuuccuguagcuggacaauaa

SEQ ID NO: 39764 - DNA, 21 bp, Homo sapiens
catcgacctgttattaatgaa

SEQ ID NO: 39765 - RNA, 21 nt, RNAi
ucgaccuguuauuaaugaauu

SEQ ID NO: 39766 - RNA, 21 nt, RNAi
uuagcuggacaauaauuacuu

SEQ ID NO: 39767 - DNA, 21 bp, Homo sapiens
catatgatatacctcaccgag

SEQ ID NO: 39768 - RNA, 21 nt, RNAi
uaugauauaccucaccgaguu

SEQ ID NO: 39769 - RNA, 21 nt, RNAi
uuauacuauauggaguggcuc

SEQ ID NO: 39770 - DNA, 21 bp, Homo sapiens
caccgagcacgtatgatctct

SEQ ID NO: 39771 - RNA, 21 nt, RNAi
ccgagcacguaugaucucuuu

SEQ ID NO: 39772 - RNA, 21 nt, RNAi
uuggcucgugcauacuagaga

SEQ ID NO: 39773 - DNA, 21 bp, Homo sapiens
cacgtatgatctctctaatag

SEQ ID NO: 39774 - RNA, 21 nt, RNAi
cguaugaucucucuaauaguu

SEQ ID NO: 39775 - RNA, 21 nt, RNAi
uugcauacuagagagauuauc

SEQ ID NO: 39776 - DNA, 21 bp, Homo sapiens
cagatgaaagaccatctttct

SEQ ID NO: 39777 - RNA, 21 nt, RNAi
gaugaaagaccaucuuucuuu

SEQ ID NO: 39778 - RNA, 21 nt, RNAi
uucuacuuucugguagaaaga

SEQ ID NO: 39779 - DNA, 21 bp, Homo sapiens
caaagttacagagtgtttcaa

SEQ ID NO: 39780 - RNA, 21 nt, RNAi
aaguuacagaguguuucaauu

SEQ ID NO: 39781 - RNA, 21 nt, RNAi
uuuucaaugucucacaaaguu

SEQ ID NO: 39782 - DNA, 21 bp, Homo sapiens
cagagtgtttcaagtgccatt

SEQ ID NO: 39783 - RNA, 21 nt, RNAi
gaguguuucaagugccauuuu

SEQ ID NO: 39784 - RNA, 21 nt, RNAi
uucucacaaaguucacgguaa

SEQ ID NO: 39785 - DNA, 21 bp, Homo sapiens
caagtgccattcacctatgtg

SEQ ID NO: 39786 - RNA, 21 nt, RNAi
agugccauucaccuauguguu

SEQ ID NO: 39787 - RNA, 21 nt, RNAi
uuucacgguaaguggauacac

SEQ ID NO: 39788 - DNA, 21 bp, Homo sapiens
cattcacctatgtgacaagaa

SEQ ID NO: 39789 - RNA, 21 nt, RNAi
uucaccuaugugacaagaauu

SEQ ID NO: 39790 - RNA, 21 nt, RNAi
uuaaguggauacacuguucuu

SEQ ID NO: 39791 - DNA, 21 bp, Homo sapiens
cacctatgtgacaagaagaaa

SEQ ID NO: 39792 - RNA, 21 nt, RNAi
ccuaugugacaagaagaaauu

SEQ ID NO: 39793 - RNA, 21 nt, RNAi
uuggauacacuguucuucuuu

SEQ ID NO: 39794 - DNA, 21 bp, Homo sapiens
catacctgtaaatcatggtcc

SEQ ID NO: 39795 - RNA, 21 nt, RNAi
uaccuguaaaucaugguccuu

SEQ ID NO: 39796 - RNA, 21 nt, RNAi
uuauggacauuuaguaccagg

SEQ ID NO: 39797 - DNA, 21 bp, Homo sapiens
catggtccacaagaggaatca

SEQ ID NO: 39798 - RNA, 21 nt, RNAi
ugguccacaagaggaaucauu

SEQ ID NO: 39799 - RNA, 21 nt, RNAi
uuaccagguguucuccuuagu

SEQ ID NO: 39800 - DNA, 21 bp, Homo sapiens
cacaagaggaatcatgtggat

SEQ ID NO: 39801 - RNA, 21 nt, RNAi
caagaggaaucauguggauuu

SEQ ID NO: 39802 - RNA, 21 nt, RNAi
uuguucuccuuaguacaccua

SEQ ID NO: 39803 - DNA, 21 bp, Homo sapiens
caagaggaatcatgtggatcc

SEQ ID NO: 39804 - RNA, 21 nt, RNAi
agaggaaucauguggauccuu

SEQ ID NO: 39805 - RNA, 21 nt, RNAi
uuucuccuuaguacaccuagg

SEQ ID NO: 39806 - DNA, 21 bp, Homo sapiens
catgtggatcctctcagctcc

SEQ ID NO: 39807 - RNA, 21 nt, RNAi
uguggauccucucagcuccuu

SEQ ID NO: 39808 - RNA, 21 nt, RNAi
uuacaccuaggagagucgagg

SEQ ID NO: 39809 - DNA, 21 bp, Homo sapiens
cagctcctcaagacaatgatt

SEQ ID NO: 39810 - RNA, 21 nt, RNAi
gcuccucaagacaaugauuuu

SEQ ID NO: 39811 - RNA, 21 nt, RNAi
uucgaggaguucuguuacuaa

SEQ ID NO: 39812 - DNA, 21 bp, Homo sapiens
catcactgtcctggaaatcac

SEQ ID NO: 39813 - RNA, 21 nt, RNAi
ucacuguccuggaaaucacuu

SEQ ID NO: 39814 - RNA, 21 nt, RNAi
uuagugacaggaccuuuagug

SEQ ID NO: 39815 - DNA, 21 bp, Homo sapiens
cactgtcctggaaatcacagt

SEQ ID NO: 39816 - RNA, 21 nt, RNAi
cuguccuggaaaucacaguuu

SEQ ID NO: 39817 - RNA, 21 nt, RNAi
uugacaggaccuuuaguguca

SEQ ID NO: 39818 - DNA, 21 bp, Homo sapiens
caccatttctggatctcaaag

SEQ ID NO: 39819 - RNA, 21 nt, RNAi
ccauuucuggaucucaaaguu

SEQ ID NO: 39820 - RNA, 21 nt, RNAi
uugguaaagaccuagaguuuc

SEQ ID NO: 39821 - DNA, 21 bp, Homo sapiens
cattctgtgatcacaagacca

SEQ ID NO: 39822 - RNA, 21 nt, RNAi
uucugugaucacaagaccauu

SEQ ID NO: 39823 - RNA, 21 nt, RNAi
uuaagacacuaguguucuggu

SEQ ID NO: 39824 - DNA, 21 bp, Homo sapiens
cacaagaccactccatgctct

SEQ ID NO: 39825 - RNA, 21 nt, RNAi
caagaccacuccaugcucuuu

SEQ ID NO: 39826 - RNA, 21 nt, RNAi
uuguucuggugagguacgaga

SEQ ID NO: 39827 - DNA, 21 bp, Homo sapiens
caagaccactccatgctcttc

SEQ ID NO: 39828 - RNA, 21 nt, RNAi
agaccacuccaugcucuucuu

SEQ ID NO: 39829 - RNA, 21 nt, RNAi
uuucuggugagguacgagaag

SEQ ID NO: 39830 - DNA, 21 bp, Homo sapiens
cactccatgctcttcagcaat

SEQ ID NO: 39831 - RNA, 21 nt, RNAi
cuccaugcucuucagcaauuu

SEQ ID NO: 39832 - RNA, 21 nt, RNAi
uugagguacgagaagucguua

SEQ ID NO: 39833 - DNA, 21 bp, Homo sapiens
catgctcttcagcaataataa

SEQ ID NO: 39834 - RNA, 21 nt, RNAi
ugcucuucagcaauaauaauu

SEQ ID NO: 39835 - RNA, 21 nt, RNAi
uuacgagaagucguuauuauu

SEQ ID NO: 39836 - DNA, 21 bp, Homo sapiens
cagcaataataaatccactct

SEQ ID NO: 39837 - RNA, 21 nt, RNAi
gcaauaauaaauccacucuuu

SEQ ID NO: 39838 - RNA, 21 nt, RNAi
uucguuauuauuuaggugaga

SEQ ID NO: 39839 - DNA, 21 bp, Homo sapiens
cactctcaactgcaggaaact

SEQ ID NO: 39840 - RNA, 21 nt, RNAi
cucucaacugcaggaaacuuu

SEQ ID NO: 39841 - RNA, 21 nt, RNAi
uugagaguugacguccuuuga

SEQ ID NO: 39842 - DNA, 21 bp, Homo sapiens
caactgcaggaaactcagaac

SEQ ID NO: 39843 - RNA, 21 nt, RNAi
acugcaggaaacucagaacuu

SEQ ID NO: 39844 - RNA, 21 nt, RNAi
uuugacguccuuugagucuug

SEQ ID NO: 39845 - DNA, 21 bp, Homo sapiens
caggaaactcagaacgtctgc

SEQ ID NO: 39846 - RNA, 21 nt, RNAi
ggaaacucagaacgucugcuu

SEQ ID NO: 39847 - RNA, 21 nt, RNAi
uuccuuugagucuugcagacg

SEQ ID NO: 39848 - DNA, 21 bp, Homo sapiens
cagaacgtctgcagcctggta

SEQ ID NO: 39849 - RNA, 21 nt, RNAi
gaacgucugcagccugguauu

SEQ ID NO: 39850 - RNA, 21 nt, RNAi
uucuugcagacgucggaccau

SEQ ID NO: 39851 - DNA, 21 bp, Homo sapiens
cagcagtggatccagagcaaa

SEQ ID NO: 39852 - RNA, 21 nt, RNAi
gcaguggauccagagcaaauu

SEQ ID NO: 39853 - RNA, 21 nt, RNAi
uucgucaccuaggucucguuu

SEQ ID NO: 39854 - DNA, 21 bp, Homo sapiens
cattgtgaaccaaatgacaga

SEQ ID NO: 39855 - RNA, 21 nt, RNAi
uugugaaccaaaugacagauu

SEQ ID NO: 39856 - RNA, 21 nt, RNAi
uuaacacuugguuuacugucu

SEQ ID NO: 39857 - DNA, 21 bp, Homo sapiens
caaatgacagaagcctgcctt

SEQ ID NO: 39858 - RNA, 21 nt, RNAi
aaugacagaagccugccuuuu

SEQ ID NO: 39859 - RNA, 21 nt, RNAi
uuuuacugucuucggacggaa

SEQ ID NO: 39860 - DNA, 21 bp, Homo sapiens
cagaagcctgccttaaccagt

SEQ ID NO: 39861 - RNA, 21 nt, RNAi
gaagccugccuuaaccaguuu

SEQ ID NO: 39862 - RNA, 21 nt, RNAi
uucuucggacggaauugguca

SEQ ID NO: 39863 - DNA, 21 bp, Homo sapiens
catgaaagaggactatgaact

SEQ ID NO: 39864 - RNA, 21 nt, RNAi
ugaaagaggacuaugaacuuu

SEQ ID NO: 39865 - RNA, 21 nt, RNAi
uuacuuucuccugauacuuga

SEQ ID NO: 39866 - DNA, 21 bp, Homo sapiens
caagcctacaaggacctcaaa

SEQ ID NO: 39867 - RNA, 21 nt, RNAi
agccuacaaggaccucaaauu

SEQ ID NO: 39868 - RNA, 21 nt, RNAi
uuucggauguuccuggaguuu

SEQ ID NO: 39869 - DNA, 21 bp, Homo sapiens
cagacaattactagacactac

SEQ ID NO: 39870 - RNA, 21 nt, RNAi
gacaauuacuagacacuacuu

SEQ ID NO: 39871 - RNA, 21 nt, RNAi
uucuguuaaugaucugugaug

SEQ ID NO: 39872 - DNA, 21 bp, Homo sapiens
caattactagacactactgac

SEQ ID NO: 39873 - RNA, 21 nt, RNAi
auuacuagacacuacugacuu

SEQ ID NO: 39874 - RNA, 21 nt, RNAi
uuuaaugaucugugaugacug

SEQ ID NO: 39875 - DNA, 21 bp, Homo sapiens
cactactgacatccaaggaga

SEQ ID NO: 39876 - RNA, 21 nt, RNAi
cuacugacauccaaggagauu

SEQ ID NO: 39877 - RNA, 21 nt, RNAi
uugaugacuguagguuccucu

SEQ ID NO: 39878 - DNA, 21 bp, Homo sapiens
catccaaggagaagaatttgc

SEQ ID NO: 39879 - RNA, 21 nt, RNAi
uccaaggagaagaauuugcuu

SEQ ID NO: 39880 - RNA, 21 nt, RNAi
uuagguuccucuucuuaaacg

SEQ ID NO: 39881 - DNA, 21 bp, Homo sapiens
caaggagaagaatttgccaaa

SEQ ID NO: 39882 - RNA, 21 nt, RNAi
aggagaagaauuugccaaauu

SEQ ID NO: 39883 - RNA, 21 nt, RNAi
uuuccucuucuuaaacgguuu

SEQ ID NO: 39884 - DNA, 21 bp, Homo sapiens
gaagcacctgcacatccacac

SEQ ID NO: 39885 - RNA, 21 nt, RNAi
agcaccugcacauccacacuu

SEQ ID NO: 39886 - RNA, 21 nt, RNAi
uuucguggacguguaggugug

SEQ ID NO: 39887 - DNA, 21 bp, Homo sapiens
gacagtgaaagaaaggatgtc

SEQ ID NO: 39888 - RNA, 21 nt, RNAi
cagugaaagaaaggaugucuu

SEQ ID NO: 39889 - RNA, 21 nt, RNAi
uugucacuuucuuuccuacag

SEQ ID NO: 39890 - DNA, 21 bp, Homo sapiens
gaaagaaaggatgtcttaaga

SEQ ID NO: 39891 - RNA, 21 nt, RNAi
aagaaaggaugucuuaagauu

SEQ ID NO: 39892 - RNA, 21 nt, RNAi
uuuucuuuccuacagaauucu

SEQ ID NO: 39893 - DNA, 21 bp, Homo sapiens
gaaaggatgtcttaagagaag

SEQ ID NO: 39894 - RNA, 21 nt, RNAi
aaggaugucuuaagagaaguu

SEQ ID NO: 39895 - RNA, 21 nt, RNAi
uuuuccuacagaauucucuuc

SEQ ID NO: 39896 - DNA, 21 bp, Homo sapiens
gatgtcttaagagaagctgaa

SEQ ID NO: 39897 - RNA, 21 nt, RNAi
ugucuuaagagaagcugaauu

SEQ ID NO: 39898 - RNA, 21 nt, RNAi
uuacagaauucucuucgacuu

SEQ ID NO: 39899 - DNA, 21 bp, Homo sapiens
gaatttgcaatgagcctgaat

SEQ ID NO: 39900 - RNA, 21 nt, RNAi
auuugcaaugagccugaauuu

SEQ ID NO: 39901 - RNA, 21 nt, RNAi
uuuaaacguuacucggacuua

SEQ ID NO: 39902 - DNA, 21 bp, Homo sapiens
gaatagttactgaatacatgc

SEQ ID NO: 39903 - RNA, 21 nt, RNAi
auaguuacugaauacaugcuu

SEQ ID NO: 39904 - RNA, 21 nt, RNAi
uuuaucaaugacuuauguacg

SEQ ID NO: 39905 - DNA, 21 bp, Homo sapiens
gaatacatgccaaatggatca

SEQ ID NO: 39906 - RNA, 21 nt, RNAi
auacaugccaaauggaucauu

SEQ ID NO: 39907 - RNA, 21 nt, RNAi
uuuauguacgguuuaccuagu

SEQ ID NO: 39908 - DNA, 21 bp, Homo sapiens
gatcattaaatgaactcctac

SEQ ID NO: 39909 - RNA, 21 nt, RNAi
ucauuaaaugaacuccuacuu

SEQ ID NO: 39910 - RNA, 21 nt, RNAi
uuaguaauuuacuugaggaug

SEQ ID NO: 39911 - DNA, 21 bp, Homo sapiens
gaatatcctgatgttgcttgg

SEQ ID NO: 39912 - RNA, 21 nt, RNAi
auauccugauguugcuugguu

SEQ ID NO: 39913 - RNA, 21 nt, RNAi
uuuauaggacuacaacgaacc

SEQ ID NO: 39914 - DNA, 21 bp, Homo sapiens
gatgttgcttggccattgaga

SEQ ID NO: 39915 - RNA, 21 nt, RNAi
uguugcuuggccauugagauu

SEQ ID NO: 39916 - RNA, 21 nt, RNAi
uuacaacgaaccgguaacucu

SEQ ID NO: 39917 - DNA, 21 bp, Homo sapiens
gagatttcgcatcctgcatga

SEQ ID NO: 39918 - RNA, 21 nt, RNAi
gauuucgcauccugcaugauu

SEQ ID NO: 39919 - RNA, 21 nt, RNAi
uucuaaagcguaggacguacu

SEQ ID NO: 39920 - DNA, 21 bp, Homo sapiens
gatttcgcatcctgcatgaaa

SEQ ID NO: 39921 - RNA, 21 nt, RNAi
uuucgcauccugcaugaaauu

SEQ ID NO: 39922 - RNA, 21 nt, RNAi
uuaaagcguaggacguacuuu

SEQ ID NO: 39923 - DNA, 21 bp, Homo sapiens
gactcctcctttacttcatca

SEQ ID NO: 39924 - RNA, 21 nt, RNAi
cuccuccuuuacuucaucauu

SEQ ID NO: 39925 - RNA, 21 nt, RNAi
uugaggaggaaaugaaguagu

SEQ ID NO: 39926 - DNA, 21 bp, Homo sapiens
gacttgaagactcagaatatc

SEQ ID NO: 39927 - RNA, 21 nt, RNAi
cuugaagacucagaauaucuu

SEQ ID NO: 39928 - RNA, 21 nt, RNAi
uugaacuucugagucuuauag

SEQ ID NO: 39929 - DNA, 21 bp, Homo sapiens
gactcagaatatcttattgga

SEQ ID NO: 39930 - RNA, 21 nt, RNAi
cucagaauaucuuauuggauu

SEQ ID NO: 39931 - RNA, 21 nt, RNAi
uugagucuuauagaauaaccu

SEQ ID NO: 39932 - DNA, 21 bp, Homo sapiens
gaagtagcaaatctgcaccag

SEQ ID NO: 39933 - RNA, 21 nt, RNAi
aguagcaaaucugcaccaguu

SEQ ID NO: 39934 - RNA, 21 nt, RNAi
uuucaucguuuagacgugguc

SEQ ID NO: 39935 - DNA, 21 bp, Homo sapiens
gacaattatctatatgccacc

SEQ ID NO: 39936 - RNA, 21 nt, RNAi
caauuaucuauaugccaccuu

SEQ ID NO: 39937 - RNA, 21 nt, RNAi
uuguuaauagauauacggugg

SEQ ID NO: 39938 - DNA, 21 bp, Homo sapiens
gaagatgtcaccaatcctttg

SEQ ID NO: 39939 - RNA, 21 nt, RNAi
agaugucaccaauccuuuguu

SEQ ID NO: 39940 - RNA, 21 nt, RNAi
uuucuacagugguuaggaaac

SEQ ID NO: 39941 - DNA, 21 bp, Homo sapiens
gatgtcaccaatcctttgcag

SEQ ID NO: 39942 - RNA, 21 nt, RNAi
ugucaccaauccuuugcaguu

SEQ ID NO: 39943 - RNA, 21 nt, RNAi
uuacagugguuaggaaacguc

SEQ ID NO: 39944 - DNA, 21 bp, Homo sapiens
gataatgtatagtgtgtcaca

SEQ ID NO: 39945 - RNA, 21 nt, RNAi
uaauguauagugugucacauu

SEQ ID NO: 39946 - RNA, 21 nt, RNAi
uuauuacauaucacacagugu

SEQ ID NO: 39947 - DNA, 21 bp, Homo sapiens
gacatcgacctgttattaatg

SEQ ID NO: 39948 - RNA, 21 nt, RNAi
caucgaccuguuauuaauguu

SEQ ID NO: 39949 - RNA, 21 nt, RNAi
uuguagcuggacaauaauuac

SEQ ID NO: 39950 - DNA, 21 bp, Homo sapiens
gaagaaagtttgccatatgat

SEQ ID NO: 39951 - RNA, 21 nt, RNAi
agaaaguuugccauaugauuu

SEQ ID NO: 39952 - RNA, 21 nt, RNAi
uuucuuucaaacgguauacua

SEQ ID NO: 39953 - DNA, 21 bp, Homo sapiens
gatatacctcaccgagcacgt

SEQ ID NO: 39954 - RNA, 21 nt, RNAi
uauaccucaccgagcacguuu

SEQ ID NO: 39955 - RNA, 21 nt, RNAi
uuauauggaguggcucgugca

SEQ ID NO: 39956 - DNA, 21 bp, Homo sapiens
gagcacgtatgatctctctaa

SEQ ID NO: 39957 - RNA, 21 nt, RNAi
gcacguaugaucucucuaauu

SEQ ID NO: 39958 - RNA, 21 nt, RNAi
uucgugcauacuagagagauu

SEQ ID NO: 39959 - DNA, 21 bp, Homo sapiens
gatctctctaatagaaagtgg

SEQ ID NO: 39960 - RNA, 21 nt, RNAi
ucucucuaauagaaagugguu

SEQ ID NO: 39961 - RNA, 21 nt, RNAi
uuagagagauuaucuuucacc

SEQ ID NO: 39962 - DNA, 21 bp, Homo sapiens
gatgaaagaccatctttctta

SEQ ID NO: 39963 - RNA, 21 nt, RNAi
ugaaagaccaucuuucuuauu

SEQ ID NO: 39964 - RNA, 21 nt, RNAi
uuacuuucugguagaaagaau

SEQ ID NO: 39965 - DNA, 21 bp, Homo sapiens
gagaacatttgaagagataac

SEQ ID NO: 39966 - RNA, 21 nt, RNAi
gaacauuugaagagauaacuu

SEQ ID NO: 39967 - RNA, 21 nt, RNAi
uucuuguaaacuucucuauug

SEQ ID NO: 39968 - DNA, 21 bp, Homo sapiens
gaagctgttattcagctaaag

SEQ ID NO: 39969 - RNA, 21 nt, RNAi
agcuguuauucagcuaaaguu

SEQ ID NO: 39970 - RNA, 21 nt, RNAi
uuucgacaauaagucgauuuc

SEQ ID NO: 39971 - DNA, 21 bp, Homo sapiens
gagtgtttcaagtgccattca

SEQ ID NO: 39972 - RNA, 21 nt, RNAi
guguuucaagugccauucauu

SEQ ID NO: 39973 - RNA, 21 nt, RNAi
uucacaaaguucacgguaagu

SEQ ID NO: 39974 - DNA, 21 bp, Homo sapiens
gaattatctctgaacatacct

SEQ ID NO: 39975 - RNA, 21 nt, RNAi
auuaucucugaacauaccuuu

SEQ ID NO: 39976 - RNA, 21 nt, RNAi
uuuaauagagacuuguaugga

SEQ ID NO: 39977 - DNA, 21 bp, Homo sapiens
gaacatacctgtaaatcatgg

SEQ ID NO: 39978 - RNA, 21 nt, RNAi
acauaccuguaaaucaugguu

SEQ ID NO: 39979 - RNA, 21 nt, RNAi
uuuguauggacauuuaguacc

SEQ ID NO: 39980 - DNA, 21 bp, Homo sapiens
gaggaatcatgtggatcctct

SEQ ID NO: 39981 - RNA, 21 nt, RNAi
ggaaucauguggauccucuuu

SEQ ID NO: 39982 - RNA, 21 nt, RNAi
uuccuuaguacaccuaggaga

SEQ ID NO: 39983 - DNA, 21 bp, Homo sapiens
gaatcatgtggatcctctcag

SEQ ID NO: 39984 - RNA, 21 nt, RNAi
aucauguggauccucucaguu

SEQ ID NO: 39985 - RNA, 21 nt, RNAi
uuuaguacaccuaggagaguc

SEQ ID NO: 39986 - DNA, 21 bp, Homo sapiens
gatcctctcagctccatgaaa

SEQ ID NO: 39987 - RNA, 21 nt, RNAi
uccucucagcuccaugaaauu

SEQ ID NO: 39988 - RNA, 21 nt, RNAi
uuaggagagucgagguacuuu

SEQ ID NO: 39989 - DNA, 21 bp, Homo sapiens
gaagctgcatcactgtcctgg

SEQ ID NO: 39990 - RNA, 21 nt, RNAi
agcugcaucacuguccugguu

SEQ ID NO: 39991 - RNA, 21 nt, RNAi
uuucgacguagugacaggacc

SEQ ID NO: 39992 - DNA, 21 bp, Homo sapiens
gatagcaccatttctggatct

SEQ ID NO: 39993 - RNA, 21 nt, RNAi
uagcaccauuucuggaucuuu

SEQ ID NO: 39994 - RNA, 21 nt, RNAi
uuaucgugguaaagaccuaga

SEQ ID NO: 39995 - DNA, 21 bp, Homo sapiens
gatcacaagaccactccatgc

SEQ ID NO: 39996 - RNA, 21 nt, RNAi
ucacaagaccacuccaugcuu

SEQ ID NO: 39997 - RNA, 21 nt, RNAi
uuaguguucuggugagguacg

SEQ ID NO: 39998 - DNA, 21 bp, Homo sapiens
gaccactccatgctcttcagc

SEQ ID NO: 39999 - RNA, 21 nt, RNAi
ccacuccaugcucuucagcuu

SEQ ID NO: 40000 - RNA, 21 nt, RNAi
uuggugagguacgagaagucg

SEQ ID NO: 40001 - DNA, 21 bp, Homo sapiens
gaaactcagaacgtctgcagc

SEQ ID NO: 40002 - RNA, 21 nt, RNAi
aacucagaacgucugcagcuu

SEQ ID NO: 40003 - RNA, 21 nt, RNAi
uuuugagucuugcagacgucg

SEQ ID NO: 40004 - DNA, 21 bp, Homo sapiens
gaacgtctgcagcctggtata

SEQ ID NO: 40005 - RNA, 21 nt, RNAi
acgucugcagccugguauauu

SEQ ID NO: 40006 - RNA, 21 nt, RNAi
uuugcagacgucggaccauau

SEQ ID NO: 40007 - DNA, 21 bp, Homo sapiens
gaagacattgtgaaccaaatg

SEQ ID NO: 40008 - RNA, 21 nt, RNAi
agacauugugaaccaaauguu

SEQ ID NO: 40009 - RNA, 21 nt, RNAi
uuucuguaacacuugguuuac

SEQ ID NO: 40010 - DNA, 21 bp, Homo sapiens
gacattgtgaaccaaatgaca

SEQ ID NO: 40011 - RNA, 21 nt, RNAi
cauugugaaccaaaugacauu

SEQ ID NO: 40012 - RNA, 21 nt, RNAi
uuguaacacuugguuuacugu

SEQ ID NO: 40013 - DNA, 21 bp, Homo sapiens
gaaccaaatgacagaagcctg

SEQ ID NO: 40014 - RNA, 21 nt, RNAi
accaaaugacagaagccuguu

SEQ ID NO: 40015 - RNA, 21 nt, RNAi
uuugguuuacugucuucggac

SEQ ID NO: 40016 - DNA, 21 bp, Homo sapiens
gacagaagcctgccttaacca

SEQ ID NO: 40017 - RNA, 21 nt, RNAi
cagaagccugccuuaaccauu

SEQ ID NO: 40018 - RNA, 21 nt, RNAi
uugucuucggacggaauuggu

SEQ ID NO: 40019 - DNA, 21 bp, Homo sapiens
gaagcctgccttaaccagtcg

SEQ ID NO: 40020 - RNA, 21 nt, RNAi
agccugccuuaaccagucguu

SEQ ID NO: 40021 - RNA, 21 nt, RNAi
uuucggacggaauuggucagc

SEQ ID NO: 40022 - DNA, 21 bp, Homo sapiens
gacttgatcatgaaagaggac

SEQ ID NO: 40023 - RNA, 21 nt, RNAi
cuugaucaugaaagaggacuu

SEQ ID NO: 40024 - RNA, 21 nt, RNAi
uugaacuaguacuuucuccug

SEQ ID NO: 40025 - DNA, 21 bp, Homo sapiens
gatcatgaaagaggactatga

SEQ ID NO: 40026 - RNA, 21 nt, RNAi
ucaugaaagaggacuaugauu

SEQ ID NO: 40027 - RNA, 21 nt, RNAi
uuaguacuuucuccugauacu

SEQ ID NO: 40028 - DNA, 21 bp, Homo sapiens
gaaagaggactatgaacttgt

SEQ ID NO: 40029 - RNA, 21 nt, RNAi
aagaggacuaugaacuuguuu

SEQ ID NO: 40030 - RNA, 21 nt, RNAi
uuuucuccugauacuugaaca

SEQ ID NO: 40031 - DNA, 21 bp, Homo sapiens
gaggactatgaacttgttagt

SEQ ID NO: 40032 - RNA, 21 nt, RNAi
ggacuaugaacuuguuaguuu

SEQ ID NO: 40033 - RNA, 21 nt, RNAi
uuccugauacuugaacaauca

SEQ ID NO: 40034 - DNA, 21 bp, Homo sapiens
gactatgaacttgttagtacc

SEQ ID NO: 40035 - RNA, 21 nt, RNAi
cuaugaacuuguuaguaccuu

SEQ ID NO: 40036 - RNA, 21 nt, RNAi
uugauacuugaacaaucaugg

SEQ ID NO: 40037 - DNA, 21 bp, Homo sapiens
gaacttgttagtaccaagcct

SEQ ID NO: 40038 - RNA, 21 nt, RNAi
acuuguuaguaccaagccuuu

SEQ ID NO: 40039 - RNA, 21 nt, RNAi
uuugaacaaucaugguucgga

SEQ ID NO: 40040 - DNA, 21 bp, Homo sapiens
gacaattactagacactactg

SEQ ID NO: 40041 - RNA, 21 nt, RNAi
caauuacuagacacuacuguu

SEQ ID NO: 40042 - RNA, 21 nt, RNAi
uuguuaaugaucugugaugac

SEQ ID NO: 40043 - DNA, 21 bp, Homo sapiens
gacactactgacatccaagga

SEQ ID NO: 40044 - RNA, 21 nt, RNAi
cacuacugacauccaaggauu

SEQ ID NO: 40045 - RNA, 21 nt, RNAi
uugugaugacuguagguuccu

SEQ ID NO: 40046 - DNA, 21 bp, Homo sapiens
gacatccaaggagaagaattt

SEQ ID NO: 40047 - RNA, 21 nt, RNAi
cauccaaggagaagaauuuuu

SEQ ID NO: 40048 - RNA, 21 nt, RNAi
uuguagguuccucuucuuaaa

SEQ ID NO: 40049 - DNA, 21 bp, Homo sapiens
gagaagaatttgccaaagtta

SEQ ID NO: 40050 - RNA, 21 nt, RNAi
gaagaauuugccaaaguuauu

SEQ ID NO: 40051 - RNA, 21 nt, RNAi
uucuucuuaaacgguuucaau

SEQ ID NO: 40052 - DNA, 21 bp, Homo sapiens
gaaatacttgtggtttctaga

SEQ ID NO: 40053 - RNA, 21 nt, RNAi
aauacuugugguuucuagauu

SEQ ID NO: 40054 - RNA, 21 nt, RNAi
uuuuaugaacaccaaagaucu

SEQ ID NO: 40055 - DNA, 21 bp, Homo sapiens
taccacaaactcgccgacctg

SEQ ID NO: 40056 - RNA, 21 nt, RNAi
ccacaaacucgccgaccuguu

SEQ ID NO: 40057 - RNA, 21 nt, RNAi
uugguguuugagcggcuggac

SEQ ID NO: 40058 - DNA, 21 bp, Homo sapiens
tagttactgaatacatgccaa

SEQ ID NO: 40059 - RNA, 21 nt, RNAi
guuacugaauacaugccaauu

SEQ ID NO: 40060 - RNA, 21 nt, RNAi
uucaaugacuuauguacgguu

SEQ ID NO: 40061 - DNA, 21 bp, Homo sapiens
tactgaatacatgccaaatgg

SEQ ID NO: 40062 - RNA, 21 nt, RNAi
cugaauacaugccaaaugguu

SEQ ID NO: 40063 - RNA, 21 nt, RNAi
uugacuuauguacgguuuacc

SEQ ID NO: 40064 - DNA, 21 bp, Homo sapiens
tacatgccaaatggatcatta

SEQ ID NO: 40065 - RNA, 21 nt, RNAi
caugccaaauggaucauuauu

SEQ ID NO: 40066 - RNA, 21 nt, RNAi
uuguacgguuuaccuaguaau

SEQ ID NO: 40067 - DNA, 21 bp, Homo sapiens
taaatgaactcctacatagga

SEQ ID NO: 40068 - RNA, 21 nt, RNAi
aaugaacuccuacauaggauu

SEQ ID NO: 40069 - RNA, 21 nt, RNAi
uuuuacuugaggauguauccu

SEQ ID NO: 40070 - DNA, 21 bp, Homo sapiens
tatcctgatgttgcttggcca

SEQ ID NO: 40071 - RNA, 21 nt, RNAi
uccugauguugcuuggccauu

SEQ ID NO: 40072 - RNA, 21 nt, RNAi
uuaggacuacaacgaaccggu

SEQ ID NO: 40073 - DNA, 21 bp, Homo sapiens
tacctgcacaatatgactcct

SEQ ID NO: 40074 - RNA, 21 nt, RNAi
ccugcacaauaugacuccuuu

SEQ ID NO: 40075 - RNA, 21 nt, RNAi
uuggacguguuauacugagga

SEQ ID NO: 40076 - DNA, 21 bp, Homo sapiens
tatgactcctcctttacttca

SEQ ID NO: 40077 - RNA, 21 nt, RNAi
ugacuccuccuuuacuucauu

SEQ ID NO: 40078 - RNA, 21 nt, RNAi
uuacugaggaggaaaugaagu

SEQ ID NO: 40079 - DNA, 21 bp, Homo sapiens
tacttcatcatgacttgaaga

SEQ ID NO: 40080 - RNA, 21 nt, RNAi
cuucaucaugacuugaagauu

SEQ ID NO: 40081 - RNA, 21 nt, RNAi
uugaaguaguacugaacuucu

SEQ ID NO: 40082 - DNA, 21 bp, Homo sapiens
tatcaaagtggcgcatgatgt

SEQ ID NO: 40083 - RNA, 21 nt, RNAi
ucaaaguggcgcaugauguuu

SEQ ID NO: 40084 - RNA, 21 nt, RNAi
uuaguuucaccgcguacuaca

SEQ ID NO: 40085 - DNA, 21 bp, Homo sapiens
tagcaaatctgcaccagaagg

SEQ ID NO: 40086 - RNA, 21 nt, RNAi
gcaaaucugcaccagaagguu

SEQ ID NO: 40087 - RNA, 21 nt, RNAi
uucguuuagacguggucuucc

SEQ ID NO: 40088 - DNA, 21 bp, Homo sapiens
tatagctatgcagttatcaca

SEQ ID NO: 40089 - RNA, 21 nt, RNAi
uagcuaugcaguuaucacauu

SEQ ID NO: 40090 - RNA, 21 nt, RNAi
uuaucgauacgucaauagugu

SEQ ID NO: 40091 - DNA, 21 bp, Homo sapiens
tagctatgcagttatcacatg

SEQ ID NO: 40092 - RNA, 21 nt, RNAi
gcuaugcaguuaucacauguu

SEQ ID NO: 40093 - RNA, 21 nt, RNAi
uucgauacgucaauaguguac

SEQ ID NO: 40094 - DNA, 21 bp, Homo sapiens
taatgtatagtgtgtcacaag

SEQ ID NO: 40095 - RNA, 21 nt, RNAi
auguauagugugucacaaguu

SEQ ID NO: 40096 - RNA, 21 nt, RNAi
uuuacauaucacacaguguuc

SEQ ID NO: 40097 - DNA, 21 bp, Homo sapiens
tatagtgtgtcacaaggacat

SEQ ID NO: 40098 - RNA, 21 nt, RNAi
uagugugucacaaggacauuu

SEQ ID NO: 40099 - RNA, 21 nt, RNAi
uuaucacacaguguuccugua

SEQ ID NO: 40100 - DNA, 21 bp, Homo sapiens
tagtgtgtcacaaggacatcg

SEQ ID NO: 40101 - RNA, 21 nt, RNAi
gugugucacaaggacaucguu

SEQ ID NO: 40102 - RNA, 21 nt, RNAi
uucacacaguguuccuguagc

SEQ ID NO: 40103 - DNA, 21 bp, Homo sapiens
tatgatatacctcaccgagca

SEQ ID NO: 40104 - RNA, 21 nt, RNAi
ugauauaccucaccgagcauu

SEQ ID NO: 40105 - RNA, 21 nt, RNAi
uuacuauauggaguggcucgu

SEQ ID NO: 40106 - DNA, 21 bp, Homo sapiens
tatacctcaccgagcacgtat

SEQ ID NO: 40107 - RNA, 21 nt, RNAi
uaccucaccgagcacguauuu

SEQ ID NO: 40108 - RNA, 21 nt, RNAi
uuauggaguggcucgugcaua

SEQ ID NO: 40109 - DNA, 21 bp, Homo sapiens
tacctcaccgagcacgtatga

SEQ ID NO: 40110 - RNA, 21 nt, RNAi
ccucaccgagcacguaugauu

SEQ ID NO: 40111 - RNA, 21 nt, RNAi
uuggaguggcucgugcauacu

SEQ ID NO: 40112 - DNA, 21 bp, Homo sapiens
tacagagtgtttcaagtgcca

SEQ ID NO: 40113 - RNA, 21 nt, RNAi
cagaguguuucaagugccauu

SEQ ID NO: 40114 - RNA, 21 nt, RNAi
uugucucacaaaguucacggu

SEQ ID NO: 40115 - DNA, 21 bp, Homo sapiens
tatctctgaacatacctgtaa

SEQ ID NO: 40116 - RNA, 21 nt, RNAi
ucucugaacauaccuguaauu

SEQ ID NO: 40117 - RNA, 21 nt, RNAi
uuagagacuuguauggacauu

SEQ ID NO: 40118 - DNA, 21 bp, Homo sapiens
tacctgtaaatcatggtccac

SEQ ID NO: 40119 - RNA, 21 nt, RNAi
ccuguaaaucaugguccacuu

SEQ ID NO: 40120 - RNA, 21 nt, RNAi
uuggacauuuaguaccaggug

SEQ ID NO: 40121 - DNA, 21 bp, Homo sapiens
taaatcatggtccacaagagg

SEQ ID NO: 40122 - RNA, 21 nt, RNAi
aaucaugguccacaagagguu

SEQ ID NO: 40123 - RNA, 21 nt, RNAi
uuuuaguaccagguguucucc

SEQ ID NO: 40124 - DNA, 21 bp, Homo sapiens
tagtggttctcctgaaacttc

SEQ ID NO: 40125 - RNA, 21 nt, RNAi
gugguucuccugaaacuucuu

SEQ ID NO: 40126 - RNA, 21 nt, RNAi
uucaccaagaggacuuugaag

SEQ ID NO: 40127 - DNA, 21 bp, Homo sapiens
tatgaagctgcatcactgtcc

SEQ ID NO: 40128 - RNA, 21 nt, RNAi
ugaagcugcaucacuguccuu

SEQ ID NO: 40129 - RNA, 21 nt, RNAi
uuacuucgacguagugacagg

SEQ ID NO: 40130 - DNA, 21 bp, Homo sapiens
tagcaccatttctggatctca

SEQ ID NO: 40131 - RNA, 21 nt, RNAi
gcaccauuucuggaucucauu

SEQ ID NO: 40132 - RNA, 21 nt, RNAi
uucgugguaaagaccuagagu

SEQ ID NO: 40133 - DNA, 21 bp, Homo sapiens
taataaatccactctcaactg

SEQ ID NO: 40134 - RNA, 21 nt, RNAi
auaaauccacucucaacuguu

SEQ ID NO: 40135 - RNA, 21 nt, RNAi
uuuauuuaggugagaguugac

SEQ ID NO: 40136 - DNA, 21 bp, Homo sapiens
taaatccactctcaactgcag

SEQ ID NO: 40137 - RNA, 21 nt, RNAi
aauccacucucaacugcaguu

SEQ ID NO: 40138 - RNA, 21 nt, RNAi
uuuuaggugagaguugacguc

SEQ ID NO: 40139 - DNA, 21 bp, Homo sapiens
tatgaacttgttagtaccaag

SEQ ID NO: 40140 - RNA, 21 nt, RNAi
ugaacuuguuaguaccaaguu

SEQ ID NO: 40141 - RNA, 21 nt, RNAi
uuacuugaacaaucaugguuc

SEQ ID NO: 40142 - DNA, 21 bp, Homo sapiens
tagtaccaagcctacaaggac

SEQ ID NO: 40143 - RNA, 21 nt, RNAi
guaccaagccuacaaggacuu

SEQ ID NO: 40144 - RNA, 21 nt, RNAi
uucaugguucggauguuccug

SEQ ID NO: 40145 - DNA, 21 bp, Homo sapiens
taccaagcctacaaggacctc

SEQ ID NO: 40146 - RNA, 21 nt, RNAi
ccaagccuacaaggaccucuu

SEQ ID NO: 40147 - RNA, 21 nt, RNAi
uugguucggauguuccuggag

SEQ ID NO: 40148 - DNA, 21 bp, Homo sapiens
tactagacactactgacatcc

SEQ ID NO: 40149 - RNA, 21 nt, RNAi
cuagacacuacugacauccuu

SEQ ID NO: 40150 - RNA, 21 nt, RNAi
uugaucugugaugacuguagg

SEQ ID NO: 40151 - DNA, 21 bp, Homo sapiens
tagacactactgacatccaag

SEQ ID NO: 40152 - RNA, 21 nt, RNAi
gacacuacugacauccaaguu

SEQ ID NO: 40153 - RNA, 21 nt, RNAi
uucugugaugacuguagguuc

SEQ ID NO: 40154 - DNA, 21 bp, Homo sapiens
tactgacatccaaggagaaga

SEQ ID NO: 40155 - RNA, 21 nt, RNAi
cugacauccaaggagaagauu

SEQ ID NO: 40156 - RNA, 21 nt, RNAi
uugacuguagguuccucuucu

SEQ ID NO: 40157 - DNA, 21 bp, Homo sapiens
tacttgtggtttctagatcac

SEQ ID NO: 40158 - RNA, 21 nt, RNAi
cuugugguuucuagaucacuu

SEQ ID NO: 40159 - RNA, 21 nt, RNAi
uugaacaccaaagaucuagug

SEQ ID NO: 40160 - DNA, 21 bp, Homo sapiens
aattacctgcacaatatgact

SEQ ID NO: 40161 - RNA, 21 nt, RNAi
uuaccugcacaauaugacuuu

SEQ ID NO: 40162 - RNA, 21 nt, RNAi
uuaauggacguguuauacuga

SEQ ID NO: 40163 - DNA, 21 bp, Homo sapiens
aaggacatcgacctgttatta

SEQ ID NO: 40164 - RNA, 21 nt, RNAi
ggacaucgaccuguuauuauu

SEQ ID NO: 40165 - RNA, 21 nt, RNAi
uuccuguagcuggacaauaau

SEQ ID NO: 40166 - DNA, 21 bp, Homo sapiens
aaagttacagagtgtttcaag

SEQ ID NO: 40167 - RNA, 21 nt, RNAi
aguuacagaguguuucaaguu

SEQ ID NO: 40168 - RNA, 21 nt, RNAi
uuucaaugucucacaaaguuc

SEQ ID NO: 40169 - DNA, 21 bp, Homo sapiens
aagttacagagtgtttcaagt

SEQ ID NO: 40170 - RNA, 21 nt, RNAi
guuacagaguguuucaaguuu

SEQ ID NO: 40171 - RNA, 21 nt, RNAi
uucaaugucucacaaaguuca

SEQ ID NO: 40172 - DNA, 21 bp, Homo sapiens
aagtgccattcacctatgtga

SEQ ID NO: 40173 - RNA, 21 nt, RNAi
gugccauucaccuaugugauu

SEQ ID NO: 40174 - RNA, 21 nt, RNAi
uucacgguaaguggauacacu

SEQ ID NO: 40175 - DNA, 21 bp, Homo sapiens
aagaggaatcatgtggatcct

SEQ ID NO: 40176 - RNA, 21 nt, RNAi
gaggaaucauguggauccuuu

SEQ ID NO: 40177 - RNA, 21 nt, RNAi
uucuccuuaguacaccuagga

SEQ ID NO: 40178 - DNA, 21 bp, Homo sapiens
aatccactctcaactgcagga

SEQ ID NO: 40179 - RNA, 21 nt, RNAi
uccacucucaacugcaggauu

SEQ ID NO: 40180 - RNA, 21 nt, RNAi
uuaggugagaguugacguccu

SEQ ID NO: 40181 - DNA, 21 bp, Homo sapiens
aactgcaggaaactcagaacg

SEQ ID NO: 40182 - RNA, 21 nt, RNAi
cugcaggaaacucagaacguu

SEQ ID NO: 40183 - RNA, 21 nt, RNAi
uugacguccuuugagucuugc

SEQ ID NO: 40184 - DNA, 21 bp, Homo sapiens
aagacattgtgaaccaaatga

SEQ ID NO: 40185 - RNA, 21 nt, RNAi
gacauugugaaccaaaugauu

SEQ ID NO: 40186 - RNA, 21 nt, RNAi
uucuguaacacuugguuuacu

SEQ ID NO: 40187 - DNA, 21 bp, Homo sapiens
aaatgacagaagcctgcctta

SEQ ID NO: 40188 - RNA, 21 nt, RNAi
augacagaagccugccuuauu

SEQ ID NO: 40189 - RNA, 21 nt, RNAi
uuuacugucuucggacggaau

SEQ ID NO: 40190 - DNA, 21 bp, Homo sapiens
aagaggactatgaacttgtta

SEQ ID NO: 40191 - RNA, 21 nt, RNAi
gaggacuaugaacuuguuauu

SEQ ID NO: 40192 - RNA, 21 nt, RNAi
uucuccugauacuugaacaau

SEQ ID NO: 40193 - DNA, 21 bp, Homo sapiens
aacttgttagtaccaagccta

SEQ ID NO: 40194 - RNA, 21 nt, RNAi
cuuguuaguaccaagccuauu

SEQ ID NO: 40195 - RNA, 21 nt, RNAi
uugaacaaucaugguucggau

SEQ ID NO: 40196 - DNA, 21 bp, Homo sapiens
cattgagatttcgcatcctgc

SEQ ID NO: 40197 - RNA, 21 nt, RNAi
uugagauuucgcauccugcuu

SEQ ID NO: 40198 - RNA, 21 nt, RNAi
uuaacucuaaagcguaggacg

SEQ ID NO: 40199 - DNA, 21 bp, Homo sapiens
cagtcacgaagtagcaaatct

SEQ ID NO: 40200 - RNA, 21 nt, RNAi
gucacgaaguagcaaaucuuu

SEQ ID NO: 40201 - RNA, 21 nt, RNAi
uucagugcuucaucguuuaga

SEQ ID NO: 40202 - DNA, 21 bp, Homo sapiens
caattatctatatgccacctg

SEQ ID NO: 40203 - RNA, 21 nt, RNAi
auuaucuauaugccaccuguu

SEQ ID NO: 40204 - RNA, 21 nt, RNAi
uuuaauagauauacgguggac

SEQ ID NO: 40205 - DNA, 21 bp, Homo sapiens
caaggacatcgacctgttatt

SEQ ID NO: 40206 - RNA, 21 nt, RNAi
aggacaucgaccuguuauuuu

SEQ ID NO: 40207 - RNA, 21 nt, RNAi
uuuccuguagcuggacaauaa

SEQ ID NO: 40208 - DNA, 21 bp, Homo sapiens
caccgagcacgtatgatctct

SEQ ID NO: 40209 - RNA, 21 nt, RNAi
ccgagcacguaugaucucuuu

SEQ ID NO: 40210 - RNA, 21 nt, RNAi
uuggcucgugcauacuagaga

SEQ ID NO: 40211 - DNA, 21 bp, Homo sapiens
cacgtatgatctctctaatag

SEQ ID NO: 40212 - RNA, 21 nt, RNAi
cguaugaucucucuaauaguu

SEQ ID NO: 40213 - RNA, 21 nt, RNAi
uugcauacuagagagauuauc

SEQ ID NO: 40214 - DNA, 21 bp, Homo sapiens
caagtgccattcacctatgtg

SEQ ID NO: 40215 - RNA, 21 nt, RNAi
agugccauucaccuauguguu

SEQ ID NO: 40216 - RNA, 21 nt, RNAi
uuucacgguaaguggauacac

SEQ ID NO: 40217 - DNA, 21 bp, Homo sapiens
caagaggaatcatgtggatcc

SEQ ID NO: 40218 - RNA, 21 nt, RNAi
agaggaaucauguggauccuu

SEQ ID NO: 40219 - RNA, 21 nt, RNAi
uuucuccuuaguacaccuagg

SEQ ID NO: 40220 - DNA, 21 bp, Homo sapiens
cactctcaactgcaggaaact

SEQ ID NO: 40221 - RNA, 21 nt, RNAi
cucucaacugcaggaaacuuu

SEQ ID NO: 40222 - RNA, 21 nt, RNAi
uugagaguugacguccuuuga

SEQ ID NO: 40223 - DNA, 21 bp, Homo sapiens
caggaaactcagaacgtctgc

SEQ ID NO: 40224 - RNA, 21 nt, RNAi
ggaaacucagaacgucugcuu

SEQ ID NO: 40225 - RNA, 21 nt, RNAi
uuccuuugagucuugcagacg

SEQ ID NO: 40226 - DNA, 21 bp, Homo sapiens
cattgtgaaccaaatgacaga

SEQ ID NO: 40227 - RNA, 21 nt, RNAi
uugugaaccaaaugacagauu

SEQ ID NO: 40228 - RNA, 21 nt, RNAi
uuaacacuugguuuacugucu

SEQ ID NO: 40229 - DNA, 21 bp, Homo sapiens
cagaagcctgccttaaccagt

SEQ ID NO: 40230 - RNA, 21 nt, RNAi
gaagccugccuuaaccaguuu

SEQ ID NO: 40231 - RNA, 21 nt, RNAi
uucuucggacggaauugguca

SEQ ID NO: 40232 - DNA, 21 bp, Homo sapiens
cagacaattactagacactac

SEQ ID NO: 40233 - RNA, 21 nt, RNAi
gacaauuacuagacacuacuu

SEQ ID NO: 40234 - RNA, 21 nt, RNAi
uucuguuaaugaucugugaug

SEQ ID NO: 40235 - DNA, 21 bp, Homo sapiens
gagatttcgcatcctgcatga

SEQ ID NO: 40236 - RNA, 21 nt, RNAi
gauuucgcauccugcaugauu

SEQ ID NO: 40237 - RNA, 21 nt, RNAi
uucuaaagcguaggacguacu

SEQ ID NO: 40238 - DNA, 21 bp, Homo sapiens
gatttcgcatcctgcatgaaa

SEQ ID NO: 40239 - RNA, 21 nt, RNAi
uuucgcauccugcaugaaauu

SEQ ID NO: 40240 - RNA, 21 nt, RNAi
uuaaagcguaggacguacuuu

SEQ ID NO: 40241 - DNA, 21 bp, Homo sapiens
gatatacctcaccgagcacgt

SEQ ID NO: 40242 - RNA, 21 nt, RNAi
uauaccucaccgagcacguuu

SEQ ID NO: 40243 - RNA, 21 nt, RNAi
uuauauggaguggcucgugca

SEQ ID NO: 40244 - DNA, 21 bp, Homo sapiens
gagcacgtatgatctctctaa

SEQ ID NO: 40245 - RNA, 21 nt, RNAi
gcacguaugaucucucuaauu

SEQ ID NO: 40246 - RNA, 21 nt, RNAi
uucgugcauacuagagagauu

SEQ ID NO: 40247 - DNA, 21 bp, Homo sapiens
gaacatacctgtaaatcatgg

SEQ ID NO: 40248 - RNA, 21 nt, RNAi
acauaccuguaaaucaugguu

SEQ ID NO: 40249 - RNA, 21 nt, RNAi
uuuguauggacauuuaguacc

SEQ ID NO: 40250 - DNA, 21 bp, Homo sapiens
gatcacaagaccactccatgc

SEQ ID NO: 40251 - RNA, 21 nt, RNAi
ucacaagaccacuccaugcuu

SEQ ID NO: 40252 - RNA, 21 nt, RNAi
uuaguguucuggugagguacg

SEQ ID NO: 40253 - DNA, 21 bp, Homo sapiens
gaaactcagaacgtctgcagc

SEQ ID NO: 40254 - RNA, 21 nt, RNAi
aacucagaacgucugcagcuu

SEQ ID NO: 40255 - RNA, 21 nt, RNAi
uuuugagucuugcagacgucg

SEQ ID NO: 40256 - DNA, 21 bp, Homo sapiens
gaacgtctgcagcctggtata

SEQ ID NO: 40257 - RNA, 21 nt, RNAi
acgucugcagccugguauauu

SEQ ID NO: 40258 - RNA, 21 nt, RNAi
uuugcagacgucggaccauau

SEQ ID NO: 40259 - DNA, 21 bp, Homo sapiens
gaagacattgtgaaccaaatg

SEQ ID NO: 40260 - RNA, 21 nt, RNAi
agacauugugaaccaaauguu

SEQ ID NO: 40261 - RNA, 21 nt, RNAi
uuucuguaacacuugguuuac

SEQ ID NO: 40262 - DNA, 21 bp, Homo sapiens
gacattgtgaaccaaatgaca

SEQ ID NO: 40263 - RNA, 21 nt, RNAi
cauugugaaccaaaugacauu

SEQ ID NO: 40264 - RNA, 21 nt, RNAi
uuguaacacuugguuuacugu

SEQ ID NO: 40265 - DNA, 21 bp, Homo sapiens
gaacttgttagtaccaagcct

SEQ ID NO: 40266 - RNA, 21 nt, RNAi
acuuguuaguaccaagccuuu

SEQ ID NO: 40267 - RNA, 21 nt, RNAi
uuugaacaaucaugguucgga

SEQ ID NO: 40268 - DNA, 21 bp, Homo sapiens
tacatgccaaatggatcatta

SEQ ID NO: 40269 - RNA, 21 nt, RNAi
caugccaaauggaucauuauu

SEQ ID NO: 40270 - RNA, 21 nt, RNAi
uuguacgguuuaccuaguaau

SEQ ID NO: 40271 - DNA, 21 bp, Homo sapiens
tacctgcacaatatgactcct

SEQ ID NO: 40272 - RNA, 21 nt, RNAi
ccugcacaauaugacuccuuu

SEQ ID NO: 40273 - RNA, 21 nt, RNAi
uuggacguguuauacugagga

SEQ ID NO: 40274 - DNA, 21 bp, Homo sapiens
tatcaaagtggcgcatgatgt

SEQ ID NO: 40275 - RNA, 21 nt, RNAi
ucaaaguggcgcaugauguuu

SEQ ID NO: 40276 - RNA, 21 nt, RNAi
uuaguuucaccgcguacuaca

SEQ ID NO: 40277 - DNA, 21 bp, Homo sapiens
tatagctatgcagttatcaca

SEQ ID NO: 40278 - RNA, 21 nt, RNAi
uagcuaugcaguuaucacauu

SEQ ID NO: 40279 - RNA, 21 nt, RNAi
uuaucgauacgucaauagugu

SEQ ID NO: 40280 - DNA, 21 bp, Homo sapiens
tatacctcaccgagcacgtat

SEQ ID NO: 40281 - RNA, 21 nt, RNAi
uaccucaccgagcacguauuu

SEQ ID NO: 40282 - RNA, 21 nt, RNAi
uuauggaguggcucgugcaua

SEQ ID NO: 40283 - DNA, 21 bp, Homo sapiens
tagtaccaagcctacaaggac

SEQ ID NO: 40284 - RNA, 21 nt, RNAi
guaccaagccuacaaggacuu

SEQ ID NO: 40285 - RNA, 21 nt, RNAi
uucaugguucggauguuccug

SEQ ID NO: 40286 - DNA, 21 bp, Homo sapiens
tagacactactgacatccaag

SEQ ID NO: 40287 - RNA, 21 nt, RNAi
gacacuacugacauccaaguu

SEQ ID NO: 40288 - RNA, 21 nt, RNAi
uucugugaugacuguagguuc

SEQ ID NO: 40289 - DNA, 21 bp, Homo sapiens
aagaggtggagctgactgaga

SEQ ID NO: 40290 - RNA, 21 nt, RNAi
gagguggagcugacugagauu

SEQ ID NO: 40291 - RNA, 21 nt, RNAi
uucuccaccucgacugacucu

SEQ ID NO: 40292 - DNA, 21 bp, Homo sapiens
aaggtgttccaggtgcgaaag

SEQ ID NO: 40293 - RNA, 21 nt, RNAi
gguguuccaggugcgaaaguu

SEQ ID NO: 40294 - RNA, 21 nt, RNAi
uuccacaagguccacgcuuuc

SEQ ID NO: 40295 - DNA, 21 bp, Homo sapiens
aaaggtgcaaggcaccaactt

SEQ ID NO: 40296 - RNA, 21 nt, RNAi
aggugcaaggcaccaacuuuu

SEQ ID NO: 40297 - RNA, 21 nt, RNAi
uuuccacguuccgugguugaa

SEQ ID NO: 40298 - DNA, 21 bp, Homo sapiens
aaggtgcaaggcaccaacttg

SEQ ID NO: 40299 - RNA, 21 nt, RNAi
ggugcaaggcaccaacuuguu

SEQ ID NO: 40300 - RNA, 21 nt, RNAi
uuccacguuccgugguugaac

SEQ ID NO: 40301 - DNA, 21 bp, Homo sapiens
aaatatatgccatgaaagtcc

SEQ ID NO: 40302 - RNA, 21 nt, RNAi
auauaugccaugaaaguccuu

SEQ ID NO: 40303 - RNA, 21 nt, RNAi
uuuauauacgguacuuucagg

SEQ ID NO: 40304 - DNA, 21 bp, Homo sapiens
aatatatgccatgaaagtcct

SEQ ID NO: 40305 - RNA, 21 nt, RNAi
uauaugccaugaaaguccuuu

SEQ ID NO: 40306 - RNA, 21 nt, RNAi
uuauauacgguacuuucagga

SEQ ID NO: 40307 - DNA, 21 bp, Homo sapiens
aaagtcctaaggaaggccaaa

SEQ ID NO: 40308 - RNA, 21 nt, RNAi
aguccuaaggaaggccaaauu

SEQ ID NO: 40309 - RNA, 21 nt, RNAi
uuucaggauuccuuccgguuu

SEQ ID NO: 40310 - DNA, 21 bp, Homo sapiens
aaattgtgcgcaatgccaagg

SEQ ID NO: 40311 - RNA, 21 nt, RNAi
auugugcgcaaugccaagguu

SEQ ID NO: 40312 - RNA, 21 nt, RNAi
uuuaacacgcguuacgguucc

SEQ ID NO: 40313 - DNA, 21 bp, Homo sapiens
aattgtgcgcaatgccaagga

SEQ ID NO: 40314 - RNA, 21 nt, RNAi
uugugcgcaaugccaaggauu

SEQ ID NO: 40315 - RNA, 21 nt, RNAi
uuaacacgcguuacgguuccu

SEQ ID NO: 40316 - DNA, 21 bp, Homo sapiens
aatgccaaggacacagcacac

SEQ ID NO: 40317 - RNA, 21 nt, RNAi
ugccaaggacacagcacacuu

SEQ ID NO: 40318 - RNA, 21 nt, RNAi
uuacgguuccugugucgugug

SEQ ID NO: 40319 - DNA, 21 bp, Homo sapiens
aaggacacagcacacacacgg

SEQ ID NO: 40320 - RNA, 21 nt, RNAi
ggacacagcacacacacgguu

SEQ ID NO: 40321 - RNA, 21 nt, RNAi
uuccugugucgugugugugcc

SEQ ID NO: 40322 - DNA, 21 bp, Homo sapiens
aacattctagagtcagtgaag

SEQ ID NO: 40323 - RNA, 21 nt, RNAi
cauucuagagucagugaaguu

SEQ ID NO: 40324 - RNA, 21 nt, RNAi
uuguaagaucucagucacuuc

SEQ ID NO: 40325 - DNA, 21 bp, Homo sapiens
aactggcctatgccttccaga

SEQ ID NO: 40326 - RNA, 21 nt, RNAi
cuggccuaugccuuccagauu

SEQ ID NO: 40327 - RNA, 21 nt, RNAi
uugaccggauacggaaggucu

SEQ ID NO: 40328 - DNA, 21 bp, Homo sapiens
aaactctacctcatccttgag

SEQ ID NO: 40329 - RNA, 21 nt, RNAi
acucuaccucauccuugaguu

SEQ ID NO: 40330 - RNA, 21 nt, RNAi
uuugagauggaguaggaacuc

SEQ ID NO: 40331 - DNA, 21 bp, Homo sapiens
aactctacctcatccttgagt

SEQ ID NO: 40332 - RNA, 21 nt, RNAi
cucuaccucauccuugaguuu

SEQ ID NO: 40333 - RNA, 21 nt, RNAi
uugagauggaguaggaacuca

SEQ ID NO: 40334 - DNA, 21 bp, Homo sapiens
aagatacggcctgcttctacc

SEQ ID NO: 40335 - RNA, 21 nt, RNAi
gauacggccugcuucuaccuu

SEQ ID NO: 40336 - RNA, 21 nt, RNAi
uucuaugccggacgaagaugg

SEQ ID NO: 40337 - DNA, 21 bp, Homo sapiens
aacatcatgctcagcagccag

SEQ ID NO: 40338 - RNA, 21 nt, RNAi
caucaugcucagcagccaguu

SEQ ID NO: 40339 - RNA, 21 nt, RNAi
uuguaguacgagucgucgguc

SEQ ID NO: 40340 - DNA, 21 bp, Homo sapiens
aaactgaccgactttggactc

SEQ ID NO: 40341 - RNA, 21 nt, RNAi
acugaccgacuuuggacucuu

SEQ ID NO: 40342 - RNA, 21 nt, RNAi
uuugacuggcugaaaccugag

SEQ ID NO: 40343 - DNA, 21 bp, Homo sapiens
aactgaccgactttggactct

SEQ ID NO: 40344 - RNA, 21 nt, RNAi
cugaccgacuuuggacucuuu

SEQ ID NO: 40345 - RNA, 21 nt, RNAi
uugacuggcugaaaccugaga

SEQ ID NO: 40346 - DNA, 21 bp, Homo sapiens
aaaccatggataagatcatca

SEQ ID NO: 40347 - RNA, 21 nt, RNAi
accauggauaagaucaucauu

SEQ ID NO: 40348 - RNA, 21 nt, RNAi
uuugguaccuauucuaguagu

SEQ ID NO: 40349 - DNA, 21 bp, Homo sapiens
aaccatggataagatcatcag

SEQ ID NO: 40350 - RNA, 21 nt, RNAi
ccauggauaagaucaucaguu

SEQ ID NO: 40351 - RNA, 21 nt, RNAi
uugguaccuauucuaguaguc

SEQ ID NO: 40352 - DNA, 21 bp, Homo sapiens
aaagtttctgaaacggaatcc

SEQ ID NO: 40353 - RNA, 21 nt, RNAi
aguuucugaaacggaauccuu

SEQ ID NO: 40354 - RNA, 21 nt, RNAi
uuucaaagacuuugccuuagg

SEQ ID NO: 40355 - DNA, 21 bp, Homo sapiens
cactatgaagaggtggagctg

SEQ ID NO: 40356 - RNA, 21 nt, RNAi
cuaugaagagguggagcuguu

SEQ ID NO: 40357 - RNA, 21 nt, RNAi
uugauacuucuccaccucgac

SEQ ID NO: 40358 - DNA, 21 bp, Homo sapiens
cactgctttgagctgctgcgt

SEQ ID NO: 40359 - RNA, 21 nt, RNAi
cugcuuugagcugcugcguuu

SEQ ID NO: 40360 - RNA, 21 nt, RNAi
uugacgaaacucgacgacgca

SEQ ID NO: 40361 - DNA, 21 bp, Homo sapiens
caaggtgttccaggtgcgaaa

SEQ ID NO: 40362 - RNA, 21 nt, RNAi
agguguuccaggugcgaaauu

SEQ ID NO: 40363 - RNA, 21 nt, RNAi
uuuccacaagguccacgcuuu

SEQ ID NO: 40364 - DNA, 21 bp, Homo sapiens
caggtgcgaaaggtgcaaggc

SEQ ID NO: 40365 - RNA, 21 nt, RNAi
ggugcgaaaggugcaaggcuu

SEQ ID NO: 40366 - RNA, 21 nt, RNAi
uuccacgcuuuccacguuccg

SEQ ID NO: 40367 - DNA, 21 bp, Homo sapiens
catgaaagtcctaaggaaggc

SEQ ID NO: 40368 - RNA, 21 nt, RNAi
ugaaaguccuaaggaaggcuu

SEQ ID NO: 40369 - RNA, 21 nt, RNAi
uuacuuucaggauuccuuccg

SEQ ID NO: 40370 - DNA, 21 bp, Homo sapiens
caatgccaaggacacagcaca

SEQ ID NO: 40371 - RNA, 21 nt, RNAi
augccaaggacacagcacauu

SEQ ID NO: 40372 - RNA, 21 nt, RNAi
uuuacgguuccugugucgugu

SEQ ID NO: 40373 - DNA, 21 bp, Homo sapiens
caaggacacagcacacacacg

SEQ ID NO: 40374 - RNA, 21 nt, RNAi
aggacacagcacacacacguu

SEQ ID NO: 40375 - RNA, 21 nt, RNAi
uuuccugugucgugugugugc

SEQ ID NO: 40376 - DNA, 21 bp, Homo sapiens
cattctagagtcagtgaagca

SEQ ID NO: 40377 - RNA, 21 nt, RNAi
uucuagagucagugaagcauu

SEQ ID NO: 40378 - RNA, 21 nt, RNAi
uuaagaucucagucacuucgu

SEQ ID NO: 40379 - DNA, 21 bp, Homo sapiens
cagactggtggcaaactctac

SEQ ID NO: 40380 - RNA, 21 nt, RNAi
gacugguggcaaacucuacuu

SEQ ID NO: 40381 - RNA, 21 nt, RNAi
uucugaccaccguuugagaug

SEQ ID NO: 40382 - DNA, 21 bp, Homo sapiens
caaactctacctcatccttga

SEQ ID NO: 40383 - RNA, 21 nt, RNAi
aacucuaccucauccuugauu

SEQ ID NO: 40384 - RNA, 21 nt, RNAi
uuuugagauggaguaggaacu

SEQ ID NO: 40385 - DNA, 21 bp, Homo sapiens
catccttgagtgcctcagtgg

SEQ ID NO: 40386 - RNA, 21 nt, RNAi
uccuugagugccucagugguu

SEQ ID NO: 40387 - RNA, 21 nt, RNAi
uuaggaacucacggagucacc

SEQ ID NO: 40388 - DNA, 21 bp, Homo sapiens
cagtggtggcgagctcttcac

SEQ ID NO: 40389 - RNA, 21 nt, RNAi
gugguggcgagcucuucacuu

SEQ ID NO: 40390 - RNA, 21 nt, RNAi
uucaccaccgcucgagaagug

SEQ ID NO: 40391 - DNA, 21 bp, Homo sapiens
catcttcctggaagatacggc

SEQ ID NO: 40392 - RNA, 21 nt, RNAi
ucuuccuggaagauacggcuu

SEQ ID NO: 40393 - RNA, 21 nt, RNAi
uuagaaggaccuucuaugccg

SEQ ID NO: 40394 - DNA, 21 bp, Homo sapiens
cacatcaaactgaccgacttt

SEQ ID NO: 40395 - RNA, 21 nt, RNAi
caucaaacugaccgacuuuuu

SEQ ID NO: 40396 - RNA, 21 nt, RNAi
uuguaguuugacuggcugaaa

SEQ ID NO: 40397 - DNA, 21 bp, Homo sapiens
catcaaactgaccgactttgg

SEQ ID NO: 40398 - RNA, 21 nt, RNAi
ucaaacugaccgacuuugguu

SEQ ID NO: 40399 - RNA, 21 nt, RNAi
uuaguuugacuggcugaaacc

SEQ ID NO: 40400 - DNA, 21 bp, Homo sapiens
caaactgaccgactttggact

SEQ ID NO: 40401 - RNA, 21 nt, RNAi
aacugaccgacuuuggacuuu

SEQ ID NO: 40402 - RNA, 21 nt, RNAi
uuuugacuggcugaaaccuga

SEQ ID NO: 40403 - DNA, 21 bp, Homo sapiens
cactcacaccttctgcggcac

SEQ ID NO: 40404 - RNA, 21 nt, RNAi
cucacaccuucugcggcacuu

SEQ ID NO: 40405 - RNA, 21 nt, RNAi
uugaguguggaagacgccgug

SEQ ID NO: 40406 - DNA, 21 bp, Homo sapiens
cacaccttctgcggcaccatt

SEQ ID NO: 40407 - RNA, 21 nt, RNAi
caccuucugcggcaccauuuu

SEQ ID NO: 40408 - RNA, 21 nt, RNAi
uuguggaagacgccgugguaa

SEQ ID NO: 40409 - DNA, 21 bp, Homo sapiens
caccttctgcggcaccattga

SEQ ID NO: 40410 - RNA, 21 nt, RNAi
ccuucugcggcaccauugauu

SEQ ID NO: 40411 - RNA, 21 nt, RNAi
uuggaagacgccgugguaacu

SEQ ID NO: 40412 - DNA, 21 bp, Homo sapiens
cagtcagaggaggacgtgagc

SEQ ID NO: 40413 - RNA, 21 nt, RNAi
gucagaggaggacgugagcuu

SEQ ID NO: 40414 - RNA, 21 nt, RNAi
uucagucuccuccugcacucg

SEQ ID NO: 40415 - DNA, 21 bp, Homo sapiens
cagaggaggacgtgagccagt

SEQ ID NO: 40416 - RNA, 21 nt, RNAi
gaggaggacgugagccaguuu

SEQ ID NO: 40417 - RNA, 21 nt, RNAi
uucuccuccugcacucgguca

SEQ ID NO: 40418 - DNA, 21 bp, Homo sapiens
cacggagctacctctacctcc

SEQ ID NO: 40419 - RNA, 21 nt, RNAi
cggagcuaccucuaccuccuu

SEQ ID NO: 40420 - RNA, 21 nt, RNAi
uugccucgauggagauggagg

SEQ ID NO: 40421 - DNA, 21 bp, Homo sapiens
gagactcgtgccgaatggcac

SEQ ID NO: 40422 - RNA, 21 nt, RNAi
gacucgugccgaauggcacuu

SEQ ID NO: 40423 - RNA, 21 nt, RNAi
uucugagcacggcuuaccgug

SEQ ID NO: 40424 - DNA, 21 bp, Homo sapiens
gactcgtgccgaatggcacga

SEQ ID NO: 40425 - RNA, 21 nt, RNAi
cucgugccgaauggcacgauu

SEQ ID NO: 40426 - RNA, 21 nt, RNAi
uugagcacggcuuaccgugcu

SEQ ID NO: 40427 - DNA, 21 bp, Homo sapiens
gatttggatttggagacggag

SEQ ID NO: 40428 - RNA, 21 nt, RNAi
uuuggauuuggagacggaguu

SEQ ID NO: 40429 - RNA, 21 nt, RNAi
uuaaaccuaaaccucugccuc

SEQ ID NO: 40430 - DNA, 21 bp, Homo sapiens
gatttggagacggaggaaggc

SEQ ID NO: 40431 - RNA, 21 nt, RNAi
uuuggagacggaggaaggcuu

SEQ ID NO: 40432 - RNA, 21 nt, RNAi
uuaaaccucugccuccuuccg

SEQ ID NO: 40433 - DNA, 21 bp, Homo sapiens
gacactatgaagaggtggagc

SEQ ID NO: 40434 - RNA, 21 nt, RNAi
cacuaugaagagguggagcuu

SEQ ID NO: 40435 - RNA, 21 nt, RNAi
uugugauacuucuccaccucg

SEQ ID NO: 40436 - DNA, 21 bp, Homo sapiens
gaagaggtggagctgactgag

SEQ ID NO: 40437 - RNA, 21 nt, RNAi
agagguggagcugacugaguu

SEQ ID NO: 40438 - RNA, 21 nt, RNAi
uuucuccaccucgacugacuc

SEQ ID NO: 40439 - DNA, 21 bp, Homo sapiens
gaggtggagctgactgagacc

SEQ ID NO: 40440 - RNA, 21 nt, RNAi
gguggagcugacugagaccuu

SEQ ID NO: 40441 - RNA, 21 nt, RNAi
uuccaccucgacugacucugg

SEQ ID NO: 40442 - DNA, 21 bp, Homo sapiens
gagctgactgagaccagcgtg

SEQ ID NO: 40443 - RNA, 21 nt, RNAi
gcugacugagaccagcguguu

SEQ ID NO: 40444 - RNA, 21 nt, RNAi
uucgacugacucuggucgcac

SEQ ID NO: 40445 - DNA, 21 bp, Homo sapiens
gactgagaccagcgtgaacgt

SEQ ID NO: 40446 - RNA, 21 nt, RNAi
cugagaccagcgugaacguuu

SEQ ID NO: 40447 - RNA, 21 nt, RNAi
uugacucuggucgcacuugca

SEQ ID NO: 40448 - DNA, 21 bp, Homo sapiens
gagaccagcgtgaacgttggc

SEQ ID NO: 40449 - RNA, 21 nt, RNAi
gaccagcgugaacguuggcuu

SEQ ID NO: 40450 - RNA, 21 nt, RNAi
uucuggucgcacuugcaaccg

SEQ ID NO: 40451 - DNA, 21 bp, Homo sapiens
gaaaggtgcaaggcaccaact

SEQ ID NO: 40452 - RNA, 21 nt, RNAi
aaggugcaaggcaccaacuuu

SEQ ID NO: 40453 - RNA, 21 nt, RNAi
uuuuccacguuccgugguuga

SEQ ID NO: 40454 - DNA, 21 bp, Homo sapiens
gaaagtcctaaggaaggccaa

SEQ ID NO: 40455 - RNA, 21 nt, RNAi
aaguccuaaggaaggccaauu

SEQ ID NO: 40456 - RNA, 21 nt, RNAi
uuuucaggauuccuuccgguu

SEQ ID NO: 40457 - DNA, 21 bp, Homo sapiens
gagcggaacattctagagtca

SEQ ID NO: 40458 - RNA, 21 nt, RNAi
gcggaacauucuagagucauu

SEQ ID NO: 40459 - RNA, 21 nt, RNAi
uucgccuuguaagaucucagu

SEQ ID NO: 40460 - DNA, 21 bp, Homo sapiens
gaacattctagagtcagtgaa

SEQ ID NO: 40461 - RNA, 21 nt, RNAi
acauucuagagucagugaauu

SEQ ID NO: 40462 - RNA, 21 nt, RNAi
uuuguaagaucucagucacuu

SEQ ID NO: 40463 - DNA, 21 bp, Homo sapiens
gaactggcctatgccttccag

SEQ ID NO: 40464 - RNA, 21 nt, RNAi
acuggccuaugccuuccaguu

SEQ ID NO: 40465 - RNA, 21 nt, RNAi
uuugaccggauacggaagguc

SEQ ID NO: 40466 - DNA, 21 bp, Homo sapiens
gactggtggcaaactctacct

SEQ ID NO: 40467 - RNA, 21 nt, RNAi
cugguggcaaacucuaccuuu

SEQ ID NO: 40468 - RNA, 21 nt, RNAi
uugaccaccguuugagaugga

SEQ ID NO: 40469 - DNA, 21 bp, Homo sapiens
gagctcttcacgcatctggag

SEQ ID NO: 40470 - RNA, 21 nt, RNAi
gcucuucacgcaucuggaguu

SEQ ID NO: 40471 - RNA, 21 nt, RNAi
uucgagaagugcguagaccuc

SEQ ID NO: 40472 - DNA, 21 bp, Homo sapiens
gaagatacggcctgcttctac

SEQ ID NO: 40473 - RNA, 21 nt, RNAi
agauacggccugcuucuacuu

SEQ ID NO: 40474 - RNA, 21 nt, RNAi
uuucuaugccggacgaagaug

SEQ ID NO: 40475 - DNA, 21 bp, Homo sapiens
gatacggcctgcttctacctg

SEQ ID NO: 40476 - RNA, 21 nt, RNAi
uacggccugcuucuaccuguu

SEQ ID NO: 40477 - RNA, 21 nt, RNAi
uuaugccggacgaagauggac

SEQ ID NO: 40478 - DNA, 21 bp, Homo sapiens
gagaacatcatgctcagcagc

SEQ ID NO: 40479 - RNA, 21 nt, RNAi
gaacaucaugcucagcagcuu

SEQ ID NO: 40480 - RNA, 21 nt, RNAi
uucuuguaguacgagucgucg

SEQ ID NO: 40481 - DNA, 21 bp, Homo sapiens
gaacatcatgctcagcagcca

SEQ ID NO: 40482 - RNA, 21 nt, RNAi
acaucaugcucagcagccauu

SEQ ID NO: 40483 - RNA, 21 nt, RNAi
uuuguaguacgagucgucggu

SEQ ID NO: 40484 - DNA, 21 bp, Homo sapiens
gaccgactttggactctgcaa

SEQ ID NO: 40485 - RNA, 21 nt, RNAi
ccgacuuuggacucugcaauu

SEQ ID NO: 40486 - RNA, 21 nt, RNAi
uuggcugaaaccugagacguu

SEQ ID NO: 40487 - DNA, 21 bp, Homo sapiens
gactttggactctgcaaggag

SEQ ID NO: 40488 - RNA, 21 nt, RNAi
cuuuggacucugcaaggaguu

SEQ ID NO: 40489 - RNA, 21 nt, RNAi
uugaaaccugagacguuccuc

SEQ ID NO: 40490 - DNA, 21 bp, Homo sapiens
gactctgcaaggagtctatcc

SEQ ID NO: 40491 - RNA, 21 nt, RNAi
cucugcaaggagucuauccuu

SEQ ID NO: 40492 - RNA, 21 nt, RNAi
uugagacguuccucagauagg

SEQ ID NO: 40493 - DNA, 21 bp, Homo sapiens
gagattctggtgcgcagtggc

SEQ ID NO: 40494 - RNA, 21 nt, RNAi
gauucuggugcgcaguggcuu

SEQ ID NO: 40495 - RNA, 21 nt, RNAi
uucuaagaccacgcgucaccg

SEQ ID NO: 40496 - DNA, 21 bp, Homo sapiens
gattctggtgcgcagtggcca

SEQ ID NO: 40497 - RNA, 21 nt, RNAi
uucuggugcgcaguggccauu

SEQ ID NO: 40498 - RNA, 21 nt, RNAi
uuaagaccacgcgucaccggu

SEQ ID NO: 40499 - DNA, 21 bp, Homo sapiens
gatgtacgacatgctcactgg

SEQ ID NO: 40500 - RNA, 21 nt, RNAi
uguacgacaugcucacugguu

SEQ ID NO: 40501 - RNA, 21 nt, RNAi
uuacaugcuguacgagugacc

SEQ ID NO: 40502 - DNA, 21 bp, Homo sapiens
gacatgctcactggatcgccg

SEQ ID NO: 40503 - RNA, 21 nt, RNAi
caugcucacuggaucgccguu

SEQ ID NO: 40504 - RNA, 21 nt, RNAi
uuguacgagugaccuagcggc

SEQ ID NO: 40505 - DNA, 21 bp, Homo sapiens
gatgctgctgatgtgcagaga

SEQ ID NO: 40506 - RNA, 21 nt, RNAi
ugcugcugaugugcagagauu

SEQ ID NO: 40507 - RNA, 21 nt, RNAi
uuacgacgacuacacgucucu

SEQ ID NO: 40508 - DNA, 21 bp, Homo sapiens
gaggaggacgtgagccagttt

SEQ ID NO: 40509 - RNA, 21 nt, RNAi
ggaggacgugagccaguuuuu

SEQ ID NO: 40510 - RNA, 21 nt, RNAi
uuccuccugcacucggucaaa

SEQ ID NO: 40511 - DNA, 21 bp, Homo sapiens
gaggacgtgagccagtttgat

SEQ ID NO: 40512 - RNA, 21 nt, RNAi
ggacgugagccaguuugauuu

SEQ ID NO: 40513 - RNA, 21 nt, RNAi
uuccugcacucggucaaacua

SEQ ID NO: 40514 - DNA, 21 bp, Homo sapiens
gacgtgagccagtttgatacc

SEQ ID NO: 40515 - RNA, 21 nt, RNAi
cgugagccaguuugauaccuu

SEQ ID NO: 40516 - RNA, 21 nt, RNAi
uugcacucggucaaacuaugg

SEQ ID NO: 40517 - DNA, 21 bp, Homo sapiens
gacagtcctgatgacacagcc

SEQ ID NO: 40518 - RNA, 21 nt, RNAi
caguccugaugacacagccuu

SEQ ID NO: 40519 - RNA, 21 nt, RNAi
uugucaggacuacugugucgg

SEQ ID NO: 40520 - DNA, 21 bp, Homo sapiens
gagagtgccaaccaggccttc

SEQ ID NO: 40521 - RNA, 21 nt, RNAi
gagugccaaccaggccuucuu

SEQ ID NO: 40522 - RNA, 21 nt, RNAi
uucucacgguugguccggaag

SEQ ID NO: 40523 - DNA, 21 bp, Homo sapiens
gagtgccaaccaggccttcct

SEQ ID NO: 40524 - RNA, 21 nt, RNAi
gugccaaccaggccuuccuuu

SEQ ID NO: 40525 - RNA, 21 nt, RNAi
uucacgguugguccggaagga

SEQ ID NO: 40526 - DNA, 21 bp, Homo sapiens
gagctacctctacctccactc

SEQ ID NO: 40527 - RNA, 21 nt, RNAi
gcuaccucuaccuccacucuu

SEQ ID NO: 40528 - RNA, 21 nt, RNAi
uucgauggagauggaggugag

SEQ ID NO: 40529 - DNA, 21 bp, Homo sapiens
gagtgcgtatgaaagtgtgtg

SEQ ID NO: 40530 - RNA, 21 nt, RNAi
gugcguaugaaaguguguguu

SEQ ID NO: 40531 - RNA, 21 nt, RNAi
uucacgcauacuuucacacac

SEQ ID NO: 40532 - DNA, 21 bp, Homo sapiens
tatgaagaggtggagctgact

SEQ ID NO: 40533 - RNA, 21 nt, RNAi
ugaagagguggagcugacuuu

SEQ ID NO: 40534 - RNA, 21 nt, RNAi
uuacuucuccaccucgacuga

SEQ ID NO: 40535 - DNA, 21 bp, Homo sapiens
tatggcaaggtgttccaggtg

SEQ ID NO: 40536 - RNA, 21 nt, RNAi
uggcaagguguuccagguguu

SEQ ID NO: 40537 - RNA, 21 nt, RNAi
uuaccguuccacaagguccac

SEQ ID NO: 40538 - DNA, 21 bp, Homo sapiens
tatatgccatgaaagtcctaa

SEQ ID NO: 40539 - RNA, 21 nt, RNAi
uaugccaugaaaguccuaauu

SEQ ID NO: 40540 - RNA, 21 nt, RNAi
uuauacgguacuuucaggauu

SEQ ID NO: 40541 - DNA, 21 bp, Homo sapiens
tatgccatgaaagtcctaagg

SEQ ID NO: 40542 - RNA, 21 nt, RNAi
ugccaugaaaguccuaagguu

SEQ ID NO: 40543 - RNA, 21 nt, RNAi
uuacgguacuuucaggauucc

SEQ ID NO: 40544 - DNA, 21 bp, Homo sapiens
tattgtggaactggcctatgc

SEQ ID NO: 40545 - RNA, 21 nt, RNAi
uuguggaacuggccuaugcuu

SEQ ID NO: 40546 - RNA, 21 nt, RNAi
uuaacaccuugaccggauacg

SEQ ID NO: 40547 - DNA, 21 bp, Homo sapiens
tatgccttccagactggtggc

SEQ ID NO: 40548 - RNA, 21 nt, RNAi
ugccuuccagacugguggcuu

SEQ ID NO: 40549 - RNA, 21 nt, RNAi
uuacggaaggucugaccaccg

SEQ ID NO: 40550 - DNA, 21 bp, Homo sapiens
tacctcatccttgagtgcctc

SEQ ID NO: 40551 - RNA, 21 nt, RNAi
ccucauccuugagugccucuu

SEQ ID NO: 40552 - RNA, 21 nt, RNAi
uuggaguaggaacucacggag

SEQ ID NO: 40553 - DNA, 21 bp, Homo sapiens
tacggcctgcttctacctggc

SEQ ID NO: 40554 - RNA, 21 nt, RNAi
cggccugcuucuaccuggcuu

SEQ ID NO: 40555 - RNA, 21 nt, RNAi
uugccggacgaagauggaccg

SEQ ID NO: 40556 - DNA, 21 bp, Homo sapiens
tacctggctgagatcacgctg

SEQ ID NO: 40557 - RNA, 21 nt, RNAi
ccuggcugagaucacgcuguu

SEQ ID NO: 40558 - RNA, 21 nt, RNAi
uuggaccgacucuagugcgac

SEQ ID NO: 40559 - DNA, 21 bp, Homo sapiens
tacgacatgctcactggatcg

SEQ ID NO: 40560 - RNA, 21 nt, RNAi
cgacaugcucacuggaucguu

SEQ ID NO: 40561 - RNA, 21 nt, RNAi
uugcuguacgagugaccuagc

SEQ ID NO: 40562 - DNA, 21 bp, Homo sapiens
taccgcagagaaccggaagaa

SEQ ID NO: 40563 - RNA, 21 nt, RNAi
ccgcagagaaccggaagaauu

SEQ ID NO: 40564 - RNA, 21 nt, RNAi
uuggcgucucuuggccuucuu

SEQ ID NO: 40565 - DNA, 21 bp, Homo sapiens
tacctctacctccactcctgc

SEQ ID NO: 40566 - RNA, 21 nt, RNAi
ccucuaccuccacuccugcuu

SEQ ID NO: 40567 - RNA, 21 nt, RNAi
uuggagauggaggugaggacg

SEQ ID NO: 40568 - DNA, 21 bp, Homo sapiens
tatgaaagtgtgtgtctgctg

SEQ ID NO: 40569 - RNA, 21 nt, RNAi
ugaaagugugugucugcuguu

SEQ ID NO: 40570 - RNA, 21 nt, RNAi
uuacuuucacacacagacgac

SEQ ID NO: 40571 - DNA, 21 bp, Homo sapiens
gaggacgtgagccagtttgat

SEQ ID NO: 40572 - RNA, 21 nt, RNAi
ggacgugagccaguuugauuu

SEQ ID NO: 40573 - RNA, 21 nt, RNAi
uuccugcacucggucaaacua

SEQ ID NO: 40574 - DNA, 21 bp, Homo sapiens
aaagtgcttgcgctccaggcc

SEQ ID NO: 40575 - RNA, 21 nt, RNAi
agugcuugcgcuccaggccuu

SEQ ID NO: 40576 - RNA, 21 nt, RNAi
uuucacgaacgcgagguccgg

SEQ ID NO: 40577 - DNA, 21 bp, Homo sapiens
aaaggaccaaggccaagaagg

SEQ ID NO: 40578 - RNA, 21 nt, RNAi
aggaccaaggccaagaagguu

SEQ ID NO: 40579 - RNA, 21 nt, RNAi
uuuccugguuccgguucuucc

SEQ ID NO: 40580 - DNA, 21 bp, Homo sapiens
aaggaccaaggccaagaagga

SEQ ID NO: 40581 - RNA, 21 nt, RNAi
ggaccaaggccaagaaggauu

SEQ ID NO: 40582 - RNA, 21 nt, RNAi
uuccugguuccgguucuuccu

SEQ ID NO: 40583 - DNA, 21 bp, Homo sapiens
aaggccaagaaggacaaagcc

SEQ ID NO: 40584 - RNA, 21 nt, RNAi
ggccaagaaggacaaagccuu

SEQ ID NO: 40585 - RNA, 21 nt, RNAi
uuccgguucuuccuguuucgg

SEQ ID NO: 40586 - DNA, 21 bp, Homo sapiens
aaaggaaatctgaaactcagc

SEQ ID NO: 40587 - RNA, 21 nt, RNAi
aggaaaucugaaacucagcuu

SEQ ID NO: 40588 - RNA, 21 nt, RNAi
uuuccuuuagacuuugagucg

SEQ ID NO: 40589 - DNA, 21 bp, Homo sapiens
aaggaaatctgaaactcagca

SEQ ID NO: 40590 - RNA, 21 nt, RNAi
ggaaaucugaaacucagcauu

SEQ ID NO: 40591 - RNA, 21 nt, RNAi
uuccuuuagacuuugagucgu

SEQ ID NO: 40592 - DNA, 21 bp, Homo sapiens
aaatctgaaactcagcaccga

SEQ ID NO: 40593 - RNA, 21 nt, RNAi
aucugaaacucagcaccgauu

SEQ ID NO: 40594 - RNA, 21 nt, RNAi
uuuagacuuugagucguggcu

SEQ ID NO: 40595 - DNA, 21 bp, Homo sapiens
aatctgaaactcagcaccgag

SEQ ID NO: 40596 - RNA, 21 nt, RNAi
ucugaaacucagcaccgaguu

SEQ ID NO: 40597 - RNA, 21 nt, RNAi
uuagacuuugagucguggcuc

SEQ ID NO: 40598 - DNA, 21 bp, Homo sapiens
aaactcagcaccgaggctctg

SEQ ID NO: 40599 - RNA, 21 nt, RNAi
acucagcaccgaggcucuguu

SEQ ID NO: 40600 - RNA, 21 nt, RNAi
uuugagucguggcuccgagac

SEQ ID NO: 40601 - DNA, 21 bp, Homo sapiens
aactcagcaccgaggctctgc

SEQ ID NO: 40602 - RNA, 21 nt, RNAi
cucagcaccgaggcucugcuu

SEQ ID NO: 40603 - RNA, 21 nt, RNAi
uugagucguggcuccgagacg

SEQ ID NO: 40604 - DNA, 21 bp, Homo sapiens
aaaggaggttatcatcttgtg

SEQ ID NO: 40605 - RNA, 21 nt, RNAi
aggagguuaucaucuuguguu

SEQ ID NO: 40606 - RNA, 21 nt, RNAi
uuuccuccaauaguagaacac

SEQ ID NO: 40607 - DNA, 21 bp, Homo sapiens
aaggaggttatcatcttgtga

SEQ ID NO: 40608 - RNA, 21 nt, RNAi
ggagguuaucaucuugugauu

SEQ ID NO: 40609 - RNA, 21 nt, RNAi
uuccuccaauaguagaacacu

SEQ ID NO: 40610 - DNA, 21 bp, Homo sapiens
aattggagatctattcaatgg

SEQ ID NO: 40611 - RNA, 21 nt, RNAi
uuggagaucuauucaaugguu

SEQ ID NO: 40612 - RNA, 21 nt, RNAi
uuaaccucuagauaaguuacc

SEQ ID NO: 40613 - DNA, 21 bp, Homo sapiens
aatttgtggcaatgaaagtag

SEQ ID NO: 40614 - RNA, 21 nt, RNAi
uuuguggcaaugaaaguaguu

SEQ ID NO: 40615 - RNA, 21 nt, RNAi
uuaaacaccguuacuuucauc

SEQ ID NO: 40616 - DNA, 21 bp, Homo sapiens
aaagtgctgaacattacactg

SEQ ID NO: 40617 - RNA, 21 nt, RNAi
agugcugaacauuacacuguu

SEQ ID NO: 40618 - RNA, 21 nt, RNAi
uuucacgacuuguaaugugac

SEQ ID NO: 40619 - DNA, 21 bp, Homo sapiens
aagtgctgaacattacactga

SEQ ID NO: 40620 - RNA, 21 nt, RNAi
gugcugaacauuacacugauu

SEQ ID NO: 40621 - RNA, 21 nt, RNAi
uucacgacuuguaaugugacu

SEQ ID NO: 40622 - DNA, 21 bp, Homo sapiens
aacattacactgaaacagcac

SEQ ID NO: 40623 - RNA, 21 nt, RNAi
cauuacacugaaacagcacuu

SEQ ID NO: 40624 - RNA, 21 nt, RNAi
uuguaaugugacuuugucgug

SEQ ID NO: 40625 - DNA, 21 bp, Homo sapiens
aaacagcactagatgaaatcc

SEQ ID NO: 40626 - RNA, 21 nt, RNAi
acagcacuagaugaaauccuu

SEQ ID NO: 40627 - RNA, 21 nt, RNAi
uuugucgugaucuacuuuagg

SEQ ID NO: 40628 - DNA, 21 bp, Homo sapiens
aacagcactagatgaaatccg

SEQ ID NO: 40629 - RNA, 21 nt, RNAi
cagcacuagaugaaauccguu

SEQ ID NO: 40630 - RNA, 21 nt, RNAi
uugucgugaucuacuuuaggc

SEQ ID NO: 40631 - DNA, 21 bp, Homo sapiens
aaatccggttgctgaagtcag

SEQ ID NO: 40632 - RNA, 21 nt, RNAi
auccgguugcugaagucaguu

SEQ ID NO: 40633 - RNA, 21 nt, RNAi
uuuaggccaacgacuucaguc

SEQ ID NO: 40634 - DNA, 21 bp, Homo sapiens
aatccggttgctgaagtcagt

SEQ ID NO: 40635 - RNA, 21 nt, RNAi
uccgguugcugaagucaguuu

SEQ ID NO: 40636 - RNA, 21 nt, RNAi
uuaggccaacgacuucaguca

SEQ ID NO: 40637 - DNA, 21 bp, Homo sapiens
aagtcagttcgcaattcagac

SEQ ID NO: 40638 - RNA, 21 nt, RNAi
gucaguucgcaauucagacuu

SEQ ID NO: 40639 - RNA, 21 nt, RNAi
uucagucaagcguuaagucug

SEQ ID NO: 40640 - DNA, 21 bp, Homo sapiens
aaatggttgttcaactactag

SEQ ID NO: 40641 - RNA, 21 nt, RNAi
augguuguucaacuacuaguu

SEQ ID NO: 40642 - RNA, 21 nt, RNAi
uuuaccaacaaguugaugauc

SEQ ID NO: 40643 - DNA, 21 bp, Homo sapiens
aatggttgttcaactactaga

SEQ ID NO: 40644 - RNA, 21 nt, RNAi
ugguuguucaacuacuagauu

SEQ ID NO: 40645 - RNA, 21 nt, RNAi
uuaccaacaaguugaugaucu

SEQ ID NO: 40646 - DNA, 21 bp, Homo sapiens
aatatcaggagttaatggaac

SEQ ID NO: 40647 - RNA, 21 nt, RNAi
uaucaggaguuaauggaacuu

SEQ ID NO: 40648 - RNA, 21 nt, RNAi
uuauaguccucaauuaccuug

SEQ ID NO: 40649 - DNA, 21 bp, Homo sapiens
aatggaacacatatctgcatg

SEQ ID NO: 40650 - RNA, 21 nt, RNAi
uggaacacauaucugcauguu

SEQ ID NO: 40651 - RNA, 21 nt, RNAi
uuaccuuguguauagacguac

SEQ ID NO: 40652 - DNA, 21 bp, Homo sapiens
aacacatatctgcatggtatt

SEQ ID NO: 40653 - RNA, 21 nt, RNAi
cacauaucugcaugguauuuu

SEQ ID NO: 40654 - RNA, 21 nt, RNAi
uuguguauagacguaccauaa

SEQ ID NO: 40655 - DNA, 21 bp, Homo sapiens
aagtggatcatcaaatccaat

SEQ ID NO: 40656 - RNA, 21 nt, RNAi
guggaucaucaaauccaauuu

SEQ ID NO: 40657 - RNA, 21 nt, RNAi
uucaccuaguaguuuagguua

SEQ ID NO: 40658 - DNA, 21 bp, Homo sapiens
aagtgccgtatcatccacact

SEQ ID NO: 40659 - RNA, 21 nt, RNAi
gugccguaucauccacacuuu

SEQ ID NO: 40660 - RNA, 21 nt, RNAi
uucacggcauaguagguguga

SEQ ID NO: 40661 - DNA, 21 bp, Homo sapiens
aaaccagagaacatcttattg

SEQ ID NO: 40662 - RNA, 21 nt, RNAi
accagagaacaucuuauuguu

SEQ ID NO: 40663 - RNA, 21 nt, RNAi
uuuggucucuuguagaauaac

SEQ ID NO: 40664 - DNA, 21 bp, Homo sapiens
aaccagagaacatcttattgt

SEQ ID NO: 40665 - RNA, 21 nt, RNAi
ccagagaacaucuuauuguuu

SEQ ID NO: 40666 - RNA, 21 nt, RNAi
uuggucucuuguagaauaaca

SEQ ID NO: 40667 - DNA, 21 bp, Homo sapiens
aatgagcagtacattcggagg

SEQ ID NO: 40668 - RNA, 21 nt, RNAi
ugagcaguacauucggagguu

SEQ ID NO: 40669 - RNA, 21 nt, RNAi
uuacucgucauguaagccucc

SEQ ID NO: 40670 - DNA, 21 bp, Homo sapiens
aagcaacagaatggcagcgat

SEQ ID NO: 40671 - RNA, 21 nt, RNAi
gcaacagaauggcagcgauuu

SEQ ID NO: 40672 - RNA, 21 nt, RNAi
uucguugucuuaccgucgcua

SEQ ID NO: 40673 - DNA, 21 bp, Homo sapiens
aacagaatggcagcgatctgg

SEQ ID NO: 40674 - RNA, 21 nt, RNAi
cagaauggcagcgaucugguu

SEQ ID NO: 40675 - RNA, 21 nt, RNAi
uugucuuaccgucgcuagacc

SEQ ID NO: 40676 - DNA, 21 bp, Homo sapiens
aatggcagcgatctggagctc

SEQ ID NO: 40677 - RNA, 21 nt, RNAi
uggcagcgaucuggagcucuu

SEQ ID NO: 40678 - RNA, 21 nt, RNAi
uuaccgucgcuagaccucgag

SEQ ID NO: 40679 - DNA, 21 bp, Homo sapiens
aagaaattgaagaagaagcag

SEQ ID NO: 40680 - RNA, 21 nt, RNAi
gaaauugaagaagaagcaguu

SEQ ID NO: 40681 - RNA, 21 nt, RNAi
uucuuuaacuucuucuucguc

SEQ ID NO: 40682 - DNA, 21 bp, Homo sapiens
aaattgaagaagaagcagaag

SEQ ID NO: 40683 - RNA, 21 nt, RNAi
auugaagaagaagcagaaguu

SEQ ID NO: 40684 - RNA, 21 nt, RNAi
uuuaacuucuucuucgucuuc

SEQ ID NO: 40685 - DNA, 21 bp, Homo sapiens
aattgaagaagaagcagaagc

SEQ ID NO: 40686 - RNA, 21 nt, RNAi
uugaagaagaagcagaagcuu

SEQ ID NO: 40687 - RNA, 21 nt, RNAi
uuaacuucuucuucgucuucg

SEQ ID NO: 40688 - DNA, 21 bp, Homo sapiens
aagaagaagcagaagcgccag

SEQ ID NO: 40689 - RNA, 21 nt, RNAi
gaagaagcagaagcgccaguu

SEQ ID NO: 40690 - RNA, 21 nt, RNAi
uucuucuucgucuucgcgguc

SEQ ID NO: 40691 - DNA, 21 bp, Homo sapiens
aagaagcagaagcgccaggca

SEQ ID NO: 40692 - RNA, 21 nt, RNAi
gaagcagaagcgccaggcauu

SEQ ID NO: 40693 - RNA, 21 nt, RNAi
uucuucgucuucgcgguccgu

SEQ ID NO: 40694 - DNA, 21 bp, Homo sapiens
aagcagaagcgccaggcagaa

SEQ ID NO: 40695 - RNA, 21 nt, RNAi
gcagaagcgccaggcagaauu

SEQ ID NO: 40696 - RNA, 21 nt, RNAi
uucgucuucgcgguccgucuu

SEQ ID NO: 40697 - DNA, 21 bp, Homo sapiens
aagcgccaggcagaattacta

SEQ ID NO: 40698 - RNA, 21 nt, RNAi
gcgccaggcagaauuacuauu

SEQ ID NO: 40699 - RNA, 21 nt, RNAi
uucgcgguccgucuuaaugau

SEQ ID NO: 40700 - DNA, 21 bp, Homo sapiens
aattactagagaagcgaatgc

SEQ ID NO: 40701 - RNA, 21 nt, RNAi
uuacuagagaagcgaaugcuu

SEQ ID NO: 40702 - RNA, 21 nt, RNAi
uuaaugaucucuucgcuuacg

SEQ ID NO: 40703 - DNA, 21 bp, Homo sapiens
aagcgaatgcaggaaattgag

SEQ ID NO: 40704 - RNA, 21 nt, RNAi
gcgaaugcaggaaauugaguu

SEQ ID NO: 40705 - RNA, 21 nt, RNAi
uucgcuuacguccuuuaacuc

SEQ ID NO: 40706 - DNA, 21 bp, Homo sapiens
aatgcaggaaattgaggaaat

SEQ ID NO: 40707 - RNA, 21 nt, RNAi
ugcaggaaauugaggaaauuu

SEQ ID NO: 40708 - RNA, 21 nt, RNAi
uuacguccuuuaacuccuuua

SEQ ID NO: 40709 - DNA, 21 bp, Homo sapiens
aaattgaggaaatggagaaag

SEQ ID NO: 40710 - RNA, 21 nt, RNAi
auugaggaaauggagaaaguu

SEQ ID NO: 40711 - RNA, 21 nt, RNAi
uuuaacuccuuuaccucuuuc

SEQ ID NO: 40712 - DNA, 21 bp, Homo sapiens
aattgaggaaatggagaaaga

SEQ ID NO: 40713 - RNA, 21 nt, RNAi
uugaggaaauggagaaagauu

SEQ ID NO: 40714 - RNA, 21 nt, RNAi
uuaacuccuuuaccucuuucu

SEQ ID NO: 40715 - DNA, 21 bp, Homo sapiens
aaagaccaaacaagcaagaag

SEQ ID NO: 40716 - RNA, 21 nt, RNAi
agaccaaacaagcaagaaguu

SEQ ID NO: 40717 - RNA, 21 nt, RNAi
uuucugguuuguucguucuuc

SEQ ID NO: 40718 - DNA, 21 bp, Homo sapiens
aagaccaaacaagcaagaaga

SEQ ID NO: 40719 - RNA, 21 nt, RNAi
gaccaaacaagcaagaagauu

SEQ ID NO: 40720 - RNA, 21 nt, RNAi
uucugguuuguucguucuucu

SEQ ID NO: 40721 - DNA, 21 bp, Homo sapiens
aaacaagcaagaagaatcaga

SEQ ID NO: 40722 - RNA, 21 nt, RNAi
acaagcaagaagaaucagauu

SEQ ID NO: 40723 - RNA, 21 nt, RNAi
uuuguucguucuucuuagucu

SEQ ID NO: 40724 - DNA, 21 bp, Homo sapiens
aacaagcaagaagaatcagag

SEQ ID NO: 40725 - RNA, 21 nt, RNAi
caagcaagaagaaucagaguu

SEQ ID NO: 40726 - RNA, 21 nt, RNAi
uuguucguucuucuuagucuc

SEQ ID NO: 40727 - DNA, 21 bp, Homo sapiens
aagcaagaagaatcagagagt

SEQ ID NO: 40728 - RNA, 21 nt, RNAi
gcaagaagaaucagagaguuu

SEQ ID NO: 40729 - RNA, 21 nt, RNAi
uucguucuucuuagucucuca

SEQ ID NO: 40730 - DNA, 21 bp, Homo sapiens
aagaagaatcagagagtcctg

SEQ ID NO: 40731 - RNA, 21 nt, RNAi
gaagaaucagagaguccuguu

SEQ ID NO: 40732 - RNA, 21 nt, RNAi
uucuucuuagucucucaggac

SEQ ID NO: 40733 - DNA, 21 bp, Homo sapiens
aagaatcagagagtcctgttg

SEQ ID NO: 40734 - RNA, 21 nt, RNAi
gaaucagagaguccuguuguu

SEQ ID NO: 40735 - RNA, 21 nt, RNAi
uucuuagucucucaggacaac

SEQ ID NO: 40736 - DNA, 21 bp, Homo sapiens
aatcagagagtcctgttgaaa

SEQ ID NO: 40737 - RNA, 21 nt, RNAi
ucagagaguccuguugaaauu

SEQ ID NO: 40738 - RNA, 21 nt, RNAi
uuagucucucaggacaacuuu

SEQ ID NO: 40739 - DNA, 21 bp, Homo sapiens
aaacttgaagagtcaagtacc

SEQ ID NO: 40740 - RNA, 21 nt, RNAi
acuugaagagucaaguaccuu

SEQ ID NO: 40741 - RNA, 21 nt, RNAi
uuugaacuucucaguucaugg

SEQ ID NO: 40742 - DNA, 21 bp, Homo sapiens
aacttgaagagtcaagtacca

SEQ ID NO: 40743 - RNA, 21 nt, RNAi
cuugaagagucaaguaccauu

SEQ ID NO: 40744 - RNA, 21 nt, RNAi
uugaacuucucaguucauggu

SEQ ID NO: 40745 - DNA, 21 bp, Homo sapiens
aagagtcaagtaccattggcc

SEQ ID NO: 40746 - RNA, 21 nt, RNAi
gagucaaguaccauuggccuu

SEQ ID NO: 40747 - RNA, 21 nt, RNAi
uucucaguucaugguaaccgg

SEQ ID NO: 40748 - DNA, 21 bp, Homo sapiens
aagtaccattggccaggatca

SEQ ID NO: 40749 - RNA, 21 nt, RNAi
guaccauuggccaggaucauu

SEQ ID NO: 40750 - RNA, 21 nt, RNAi
uucaugguaaccgguccuagu

SEQ ID NO: 40751 - DNA, 21 bp, Homo sapiens
aaacgcttatggaacgtgata

SEQ ID NO: 40752 - RNA, 21 nt, RNAi
acgcuuauggaacgugauauu

SEQ ID NO: 40753 - RNA, 21 nt, RNAi
uuugcgaauaccuugcacuau

SEQ ID NO: 40754 - DNA, 21 bp, Homo sapiens
aacgcttatggaacgtgatac

SEQ ID NO: 40755 - RNA, 21 nt, RNAi
cgcuuauggaacgugauacuu

SEQ ID NO: 40756 - RNA, 21 nt, RNAi
uugcgaauaccuugcacuaug

SEQ ID NO: 40757 - DNA, 21 bp, Homo sapiens
aattgcaatggagtgattgaa

SEQ ID NO: 40758 - RNA, 21 nt, RNAi
uugcaauggagugauugaauu

SEQ ID NO: 40759 - RNA, 21 nt, RNAi
uuaacguuaccucacuaacuu

SEQ ID NO: 40760 - DNA, 21 bp, Homo sapiens
aatggagtgattgaagtcatt

SEQ ID NO: 40761 - RNA, 21 nt, RNAi
uggagugauugaagucauuuu

SEQ ID NO: 40762 - RNA, 21 nt, RNAi
uuaccucacuaacuucaguaa

SEQ ID NO: 40763 - DNA, 21 bp, Homo sapiens
aaacattgagacataaagagg

SEQ ID NO: 40764 - RNA, 21 nt, RNAi
acauugagacauaaagagguu

SEQ ID NO: 40765 - RNA, 21 nt, RNAi
uuuguaacucuguauuucucc

SEQ ID NO: 40766 - DNA, 21 bp, Homo sapiens
aacattgagacataaagagga

SEQ ID NO: 40767 - RNA, 21 nt, RNAi
cauugagacauaaagaggauu

SEQ ID NO: 40768 - RNA, 21 nt, RNAi
uuguaacucuguauuucuccu

SEQ ID NO: 40769 - DNA, 21 bp, Homo sapiens
aaagaggatctacataatgct

SEQ ID NO: 40770 - RNA, 21 nt, RNAi
agaggaucuacauaaugcuuu

SEQ ID NO: 40771 - RNA, 21 nt, RNAi
uuucuccuagauguauuacga

SEQ ID NO: 40772 - DNA, 21 bp, Homo sapiens
aagaggatctacataatgcta

SEQ ID NO: 40773 - RNA, 21 nt, RNAi
gaggaucuacauaaugcuauu

SEQ ID NO: 40774 - RNA, 21 nt, RNAi
uucuccuagauguauuacgau

SEQ ID NO: 40775 - DNA, 21 bp, Homo sapiens
aatgctaatgactgtgatgtc

SEQ ID NO: 40776 - RNA, 21 nt, RNAi
ugcuaaugacugugaugucuu

SEQ ID NO: 40777 - RNA, 21 nt, RNAi
uuacgauuacugacacuacag

SEQ ID NO: 40778 - DNA, 21 bp, Homo sapiens
aatcaggaatctagtttccta

SEQ ID NO: 40779 - RNA, 21 nt, RNAi
ucaggaaucuaguuuccuauu

SEQ ID NO: 40780 - RNA, 21 nt, RNAi
uuaguccuuagaucaaaggau

SEQ ID NO: 40781 - DNA, 21 bp, Homo sapiens
aaatggagacagcagcacatc

SEQ ID NO: 40782 - RNA, 21 nt, RNAi
auggagacagcagcacaucuu

SEQ ID NO: 40783 - RNA, 21 nt, RNAi
uuuaccucugucgucguguag

SEQ ID NO: 40784 - DNA, 21 bp, Homo sapiens
aatggagacagcagcacatct

SEQ ID NO: 40785 - RNA, 21 nt, RNAi
uggagacagcagcacaucuuu

SEQ ID NO: 40786 - RNA, 21 nt, RNAi
uuaccucugucgucguguaga

SEQ ID NO: 40787 - DNA, 21 bp, Homo sapiens
aagaaacagactcttgtacac

SEQ ID NO: 40788 - RNA, 21 nt, RNAi
gaaacagacucuuguacacuu

SEQ ID NO: 40789 - RNA, 21 nt, RNAi
uucuuugucugagaacaugug

SEQ ID NO: 40790 - DNA, 21 bp, Homo sapiens
aaacagactcttgtacaccta

SEQ ID NO: 40791 - RNA, 21 nt, RNAi
acagacucuuguacaccuauu

SEQ ID NO: 40792 - RNA, 21 nt, RNAi
uuugucugagaacauguggau

SEQ ID NO: 40793 - DNA, 21 bp, Homo sapiens
aacagactcttgtacacctat

SEQ ID NO: 40794 - RNA, 21 nt, RNAi
cagacucuuguacaccuauuu

SEQ ID NO: 40795 - RNA, 21 nt, RNAi
uugucugagaacauguggaua

SEQ ID NO: 40796 - DNA, 21 bp, Homo sapiens
aacatctgaggtgtcagacac

SEQ ID NO: 40797 - RNA, 21 nt, RNAi
caucugaggugucagacacuu

SEQ ID NO: 40798 - RNA, 21 nt, RNAi
uuguagacuccacagucugug

SEQ ID NO: 40799 - DNA, 21 bp, Homo sapiens
aactgtaggtcagtcattcag

SEQ ID NO: 40800 - RNA, 21 nt, RNAi
cuguaggucagucauucaguu

SEQ ID NO: 40801 - RNA, 21 nt, RNAi
uugacauccagucaguaaguc

SEQ ID NO: 40802 - DNA, 21 bp, Homo sapiens
aacaacacattagccaacttc

SEQ ID NO: 40803 - RNA, 21 nt, RNAi
caacacauuagccaacuucuu

SEQ ID NO: 40804 - RNA, 21 nt, RNAi
uuguuguguaaucgguugaag

SEQ ID NO: 40805 - DNA, 21 bp, Homo sapiens
aacacattagccaacttcaag

SEQ ID NO: 40806 - RNA, 21 nt, RNAi
cacauuagccaacuucaaguu

SEQ ID NO: 40807 - RNA, 21 nt, RNAi
uuguguaaucgguugaaguuc

SEQ ID NO: 40808 - DNA, 21 bp, Homo sapiens
aagatgaacaagagcaagaac

SEQ ID NO: 40809 - RNA, 21 nt, RNAi
gaugaacaagagcaagaacuu

SEQ ID NO: 40810 - RNA, 21 nt, RNAi
uucuacuuguucucguucuug

SEQ ID NO: 40811 - DNA, 21 bp, Homo sapiens
aacaagagcaagaacataacg

SEQ ID NO: 40812 - RNA, 21 nt, RNAi
caagagcaagaacauaacguu

SEQ ID NO: 40813 - RNA, 21 nt, RNAi
uuguucucguucuuguauugc

SEQ ID NO: 40814 - DNA, 21 bp, Homo sapiens
aagagcaagaacataacggac

SEQ ID NO: 40815 - RNA, 21 nt, RNAi
gagcaagaacauaacggacuu

SEQ ID NO: 40816 - RNA, 21 nt, RNAi
uucucguucuuguauugccug

SEQ ID NO: 40817 - DNA, 21 bp, Homo sapiens
aagaacataacggaccactgg

SEQ ID NO: 40818 - RNA, 21 nt, RNAi
gaacauaacggaccacugguu

SEQ ID NO: 40819 - RNA, 21 nt, RNAi
uucuuguauugccuggugacc

SEQ ID NO: 40820 - DNA, 21 bp, Homo sapiens
aacataacggaccactggaca

SEQ ID NO: 40821 - RNA, 21 nt, RNAi
cauaacggaccacuggacauu

SEQ ID NO: 40822 - RNA, 21 nt, RNAi
uuguauugccuggugaccugu

SEQ ID NO: 40823 - DNA, 21 bp, Homo sapiens
aacggaccactggacaacaaa

SEQ ID NO: 40824 - RNA, 21 nt, RNAi
cggaccacuggacaacaaauu

SEQ ID NO: 40825 - RNA, 21 nt, RNAi
uugccuggugaccuguuguuu

SEQ ID NO: 40826 - DNA, 21 bp, Homo sapiens
aaagctcaaggtgaagattgc

SEQ ID NO: 40827 - RNA, 21 nt, RNAi
agcucaaggugaagauugcuu

SEQ ID NO: 40828 - RNA, 21 nt, RNAi
uuucgaguuccacuucuaacg

SEQ ID NO: 40829 - DNA, 21 bp, Homo sapiens
aagctcaaggtgaagattgct

SEQ ID NO: 40830 - RNA, 21 nt, RNAi
gcucaaggugaagauugcuuu

SEQ ID NO: 40831 - RNA, 21 nt, RNAi
uucgaguuccacuucuaacga

SEQ ID NO: 40832 - DNA, 21 bp, Homo sapiens
aaggtgaagattgctgacctt

SEQ ID NO: 40833 - RNA, 21 nt, RNAi
ggugaagauugcugaccuuuu

SEQ ID NO: 40834 - RNA, 21 nt, RNAi
uuccacuucuaacgacuggaa

SEQ ID NO: 40835 - DNA, 21 bp, Homo sapiens
aagattgctgaccttggaaat

SEQ ID NO: 40836 - RNA, 21 nt, RNAi
gauugcugaccuuggaaauuu

SEQ ID NO: 40837 - RNA, 21 nt, RNAi
uucuaacgacuggaaccuuua

SEQ ID NO: 40838 - DNA, 21 bp, Homo sapiens
aaatgcttgttggcacaaaca

SEQ ID NO: 40839 - RNA, 21 nt, RNAi
augcuuguuggcacaaacauu

SEQ ID NO: 40840 - RNA, 21 nt, RNAi
uuuacgaacaaccguguuugu

SEQ ID NO: 40841 - DNA, 21 bp, Homo sapiens
aatgcttgttggcacaaacat

SEQ ID NO: 40842 - RNA, 21 nt, RNAi
ugcuuguuggcacaaacauuu

SEQ ID NO: 40843 - RNA, 21 nt, RNAi
uuacgaacaaccguguuugua

SEQ ID NO: 40844 - DNA, 21 bp, Homo sapiens
aaacaaggcaatatcgttcct

SEQ ID NO: 40845 - RNA, 21 nt, RNAi
acaaggcaauaucguuccuuu

SEQ ID NO: 40846 - RNA, 21 nt, RNAi
uuuguuccguuauagcaagga

SEQ ID NO: 40847 - DNA, 21 bp, Homo sapiens
aacaaggcaatatcgttcctt

SEQ ID NO: 40848 - RNA, 21 nt, RNAi
caaggcaauaucguuccuuuu

SEQ ID NO: 40849 - RNA, 21 nt, RNAi
uuguuccguuauagcaaggaa

SEQ ID NO: 40850 - DNA, 21 bp, Homo sapiens
aaggcaatatcgttccttgga

SEQ ID NO: 40851 - RNA, 21 nt, RNAi
ggcaauaucguuccuuggauu

SEQ ID NO: 40852 - RNA, 21 nt, RNAi
uuccguuauagcaaggaaccu

SEQ ID NO: 40853 - DNA, 21 bp, Homo sapiens
aatatcgttccttggaagttc

SEQ ID NO: 40854 - RNA, 21 nt, RNAi
uaucguuccuuggaaguucuu

SEQ ID NO: 40855 - RNA, 21 nt, RNAi
uuauagcaaggaaccuucaag

SEQ ID NO: 40856 - DNA, 21 bp, Homo sapiens
aagttctaatcggatctggct

SEQ ID NO: 40857 - RNA, 21 nt, RNAi
guucuaaucggaucuggcuuu

SEQ ID NO: 40858 - RNA, 21 nt, RNAi
uucaagauuagccuagaccga

SEQ ID NO: 40859 - DNA, 21 bp, Homo sapiens
aatcggatctggctataatac

SEQ ID NO: 40860 - RNA, 21 nt, RNAi
ucggaucuggcuauaauacuu

SEQ ID NO: 40861 - RNA, 21 nt, RNAi
uuagccuagaccgauauuaug

SEQ ID NO: 40862 - DNA, 21 bp, Homo sapiens
aactggccacaggtgactatt

SEQ ID NO: 40863 - RNA, 21 nt, RNAi
cuggccacaggugacuauuuu

SEQ ID NO: 40864 - RNA, 21 nt, RNAi
uugaccgguguccacugauaa

SEQ ID NO: 40865 - DNA, 21 bp, Homo sapiens
aagagtacactcgagatgaag

SEQ ID NO: 40866 - RNA, 21 nt, RNAi
gaguacacucgagaugaaguu

SEQ ID NO: 40867 - RNA, 21 nt, RNAi
uucucaugugagcucuacuuc

SEQ ID NO: 40868 - DNA, 21 bp, Homo sapiens
aagatcacattgcattgatca

SEQ ID NO: 40869 - RNA, 21 nt, RNAi
gaucacauugcauugaucauu

SEQ ID NO: 40870 - RNA, 21 nt, RNAi
uucuaguguaacguaacuagu

SEQ ID NO: 40871 - DNA, 21 bp, Homo sapiens
aaggtgcctcgcaagctcatt

SEQ ID NO: 40872 - RNA, 21 nt, RNAi
ggugccucgcaagcucauuuu

SEQ ID NO: 40873 - RNA, 21 nt, RNAi
uuccacggagcguucgaguaa

SEQ ID NO: 40874 - DNA, 21 bp, Homo sapiens
aaaggtgacctgaaacatatc

SEQ ID NO: 40875 - RNA, 21 nt, RNAi
aggugaccugaaacauaucuu

SEQ ID NO: 40876 - RNA, 21 nt, RNAi
uuuccacuggacuuuguauag

SEQ ID NO: 40877 - DNA, 21 bp, Homo sapiens
aaggtgacctgaaacatatca

SEQ ID NO: 40878 - RNA, 21 nt, RNAi
ggugaccugaaacauaucauu

SEQ ID NO: 40879 - RNA, 21 nt, RNAi
uuccacuggacuuuguauagu

SEQ ID NO: 40880 - DNA, 21 bp, Homo sapiens
aaacatatcacgaagctgaaa

SEQ ID NO: 40881 - RNA, 21 nt, RNAi
acauaucacgaagcugaaauu

SEQ ID NO: 40882 - RNA, 21 nt, RNAi
uuuguauagugcuucgacuuu

SEQ ID NO: 40883 - DNA, 21 bp, Homo sapiens
aacatatcacgaagctgaaac

SEQ ID NO: 40884 - RNA, 21 nt, RNAi
cauaucacgaagcugaaacuu

SEQ ID NO: 40885 - RNA, 21 nt, RNAi
uuguauagugcuucgacuuug

SEQ ID NO: 40886 - DNA, 21 bp, Homo sapiens
aagtatgagtggtcgcaggaa

SEQ ID NO: 40887 - RNA, 21 nt, RNAi
guaugaguggucgcaggaauu

SEQ ID NO: 40888 - RNA, 21 nt, RNAi
uucauacucaccagcguccuu

SEQ ID NO: 40889 - DNA, 21 bp, Homo sapiens
aagaggcagctggcttcacag

SEQ ID NO: 40890 - RNA, 21 nt, RNAi
gaggcagcuggcuucacaguu

SEQ ID NO: 40891 - RNA, 21 nt, RNAi
uucuccgucgaccgaaguguc

SEQ ID NO: 40892 - DNA, 21 bp, Homo sapiens
aagctcttccttcaagagttt

SEQ ID NO: 40893 - RNA, 21 nt, RNAi
gcucuuccuucaagaguuuuu

SEQ ID NO: 40894 - RNA, 21 nt, RNAi
uucgagaaggaaguucucaaa

SEQ ID NO: 40895 - DNA, 21 bp, Homo sapiens
aaatgtgaaacagcctcttgc

SEQ ID NO: 40896 - RNA, 21 nt, RNAi
augugaaacagccucuugcuu

SEQ ID NO: 40897 - RNA, 21 nt, RNAi
uuuacacuuugucggagaacg

SEQ ID NO: 40898 - DNA, 21 bp, Homo sapiens
aatgtgaaacagcctcttgcc

SEQ ID NO: 40899 - RNA, 21 nt, RNAi
ugugaaacagccucuugccuu

SEQ ID NO: 40900 - RNA, 21 nt, RNAi
uuacacuuugucggagaacgg

SEQ ID NO: 40901 - DNA, 21 bp, Homo sapiens
aaagagctatgaaggtgtatg

SEQ ID NO: 40902 - RNA, 21 nt, RNAi
agagcuaugaagguguauguu

SEQ ID NO: 40903 - RNA, 21 nt, RNAi
uuucucgauacuuccacauac

SEQ ID NO: 40904 - DNA, 21 bp, Homo sapiens
aagagctatgaaggtgtatga

SEQ ID NO: 40905 - RNA, 21 nt, RNAi
gagcuaugaagguguaugauu

SEQ ID NO: 40906 - RNA, 21 nt, RNAi
uucucgauacuuccacauacu

SEQ ID NO: 40907 - DNA, 21 bp, Homo sapiens
aattctatgtacagcagagac

SEQ ID NO: 40908 - RNA, 21 nt, RNAi
uucuauguacagcagagacuu

SEQ ID NO: 40909 - RNA, 21 nt, RNAi
uuaagauacaugucgucucug

SEQ ID NO: 40910 - DNA, 21 bp, Homo sapiens
aaagcactgtcaaattccttt

SEQ ID NO: 40911 - RNA, 21 nt, RNAi
agcacugucaaauuccuuuuu

SEQ ID NO: 40912 - RNA, 21 nt, RNAi
uuucgugacaguuuaaggaaa

SEQ ID NO: 40913 - DNA, 21 bp, Homo sapiens
aagcactgtcaaattcctttc

SEQ ID NO: 40914 - RNA, 21 nt, RNAi
gcacugucaaauuccuuucuu

SEQ ID NO: 40915 - RNA, 21 nt, RNAi
uucgugacaguuuaaggaaag

SEQ ID NO: 40916 - DNA, 21 bp, Homo sapiens
aagatctttgaatcttcagtc

SEQ ID NO: 40917 - RNA, 21 nt, RNAi
gaucuuugaaucuucagucuu

SEQ ID NO: 40918 - RNA, 21 nt, RNAi
uucuagaaacuuagaagucag

SEQ ID NO: 40919 - DNA, 21 bp, Homo sapiens
aatttcttgagaacctcaggt

SEQ ID NO: 40920 - RNA, 21 nt, RNAi
uuucuugagaaccucagguuu

SEQ ID NO: 40921 - RNA, 21 nt, RNAi
uuaaagaacucuuggagucca

SEQ ID NO: 40922 - DNA, 21 bp, Homo sapiens
aacctcaggtgttctataaac

SEQ ID NO: 40923 - RNA, 21 nt, RNAi
ccucagguguucuauaaacuu

SEQ ID NO: 40924 - RNA, 21 nt, RNAi
uuggaguccacaagauauuug

SEQ ID NO: 40925 - DNA, 21 bp, Homo sapiens
aaacagtcctttcctgtatgt

SEQ ID NO: 40926 - RNA, 21 nt, RNAi
acaguccuuuccuguauguuu

SEQ ID NO: 40927 - RNA, 21 nt, RNAi
uuugucaggaaaggacauaca

SEQ ID NO: 40928 - DNA, 21 bp, Homo sapiens
aacagtcctttcctgtatgtc

SEQ ID NO: 40929 - RNA, 21 nt, RNAi
caguccuuuccuguaugucuu

SEQ ID NO: 40930 - RNA, 21 nt, RNAi
uugucaggaaaggacauacag

SEQ ID NO: 40931 - DNA, 21 bp, Homo sapiens
aactaaaggatcaggatgatg

SEQ ID NO: 40932 - RNA, 21 nt, RNAi
cuaaaggaucaggaugauguu

SEQ ID NO: 40933 - RNA, 21 nt, RNAi
uugauuuccuaguccuacuac

SEQ ID NO: 40934 - DNA, 21 bp, Homo sapiens
aaaggatcaggatgatggtag

SEQ ID NO: 40935 - RNA, 21 nt, RNAi
aggaucaggaugaugguaguu

SEQ ID NO: 40936 - RNA, 21 nt, RNAi
uuuccuaguccuacuaccauc

SEQ ID NO: 40937 - DNA, 21 bp, Homo sapiens
aaggatcaggatgatggtaga

SEQ ID NO: 40938 - RNA, 21 nt, RNAi
ggaucaggaugaugguagauu

SEQ ID NO: 40939 - RNA, 21 nt, RNAi
uuccuaguccuacuaccaucu

SEQ ID NO: 40940 - DNA, 21 bp, Homo sapiens
aaattctggccttgaagcagt

SEQ ID NO: 40941 - RNA, 21 nt, RNAi
auucuggccuugaagcaguuu

SEQ ID NO: 40942 - RNA, 21 nt, RNAi
uuuaagaccggaacuucguca

SEQ ID NO: 40943 - DNA, 21 bp, Homo sapiens
aattctggccttgaagcagtt

SEQ ID NO: 40944 - RNA, 21 nt, RNAi
uucuggccuugaagcaguuuu

SEQ ID NO: 40945 - RNA, 21 nt, RNAi
uuaagaccggaacuucgucaa

SEQ ID NO: 40946 - DNA, 21 bp, Homo sapiens
aagattagccattctctgctg

SEQ ID NO: 40947 - RNA, 21 nt, RNAi
gauuagccauucucugcuguu

SEQ ID NO: 40948 - RNA, 21 nt, RNAi
uucuaaucgguaagagacgac

SEQ ID NO: 40949 - DNA, 21 bp, Homo sapiens
aagtggctgtaggactcgaat

SEQ ID NO: 40950 - RNA, 21 nt, RNAi
guggcuguaggacucgaauuu

SEQ ID NO: 40951 - RNA, 21 nt, RNAi
uucaccgacauccugagcuua

SEQ ID NO: 40952 - DNA, 21 bp, Homo sapiens
aatttacagaaagccacagag

SEQ ID NO: 40953 - RNA, 21 nt, RNAi
uuuacagaaagccacagaguu

SEQ ID NO: 40954 - RNA, 21 nt, RNAi
uuaaaugucuuucggugucuc

SEQ ID NO: 40955 - DNA, 21 bp, Homo sapiens
aaagccacagaggtgcaactt

SEQ ID NO: 40956 - RNA, 21 nt, RNAi
agccacagaggugcaacuuuu

SEQ ID NO: 40957 - RNA, 21 nt, RNAi
uuucggugucuccacguugaa

SEQ ID NO: 40958 - DNA, 21 bp, Homo sapiens
aagccacagaggtgcaacttg

SEQ ID NO: 40959 - RNA, 21 nt, RNAi
gccacagaggugcaacuuguu

SEQ ID NO: 40960 - RNA, 21 nt, RNAi
uucggugucuccacguugaac

SEQ ID NO: 40961 - DNA, 21 bp, Homo sapiens
aacttgaggctctgctagcaa

SEQ ID NO: 40962 - RNA, 21 nt, RNAi
cuugaggcucugcuagcaauu

SEQ ID NO: 40963 - RNA, 21 nt, RNAi
uugaacuccgagacgaucguu

SEQ ID NO: 40964 - DNA, 21 bp, Homo sapiens
aagccaccagtgaggctattg

SEQ ID NO: 40965 - RNA, 21 nt, RNAi
gccaccagugaggcuauuguu

SEQ ID NO: 40966 - RNA, 21 nt, RNAi
uucgguggucacuccgauaac

SEQ ID NO: 40967 - DNA, 21 bp, Homo sapiens
aaccacctttctatacaggag

SEQ ID NO: 40968 - RNA, 21 nt, RNAi
ccaccuuucuauacaggaguu

SEQ ID NO: 40969 - RNA, 21 nt, RNAi
uugguggaaagauauguccuc

SEQ ID NO: 40970 - DNA, 21 bp, Homo sapiens
aaagtggtgccgttatgcaat

SEQ ID NO: 40971 - RNA, 21 nt, RNAi
aguggugccguuaugcaauuu

SEQ ID NO: 40972 - RNA, 21 nt, RNAi
uuucaccacggcaauacguua

SEQ ID NO: 40973 - DNA, 21 bp, Homo sapiens
aagtggtgccgttatgcaatc

SEQ ID NO: 40974 - RNA, 21 nt, RNAi
guggugccguuaugcaaucuu

SEQ ID NO: 40975 - RNA, 21 nt, RNAi
uucaccacggcaauacguuag

SEQ ID NO: 40976 - DNA, 21 bp, Homo sapiens
aactggccagccattcatcgg

SEQ ID NO: 40977 - RNA, 21 nt, RNAi
cuggccagccauucaucgguu

SEQ ID NO: 40978 - RNA, 21 nt, RNAi
uugaccggucgguaaguagcc

SEQ ID NO: 40979 - DNA, 21 bp, Homo sapiens
aaatcagacatgttcctgtag

SEQ ID NO: 40980 - RNA, 21 nt, RNAi
aucagacauguuccuguaguu

SEQ ID NO: 40981 - RNA, 21 nt, RNAi
uuuagucuguacaaggacauc

SEQ ID NO: 40982 - DNA, 21 bp, Homo sapiens
aatcagacatgttcctgtaga

SEQ ID NO: 40983 - RNA, 21 nt, RNAi
ucagacauguuccuguagauu

SEQ ID NO: 40984 - RNA, 21 nt, RNAi
uuagucuguacaaggacaucu

SEQ ID NO: 40985 - DNA, 21 bp, Homo sapiens
aagttaggctttctatgcacc

SEQ ID NO: 40986 - RNA, 21 nt, RNAi
guuaggcuuucuaugcaccuu

SEQ ID NO: 40987 - RNA, 21 nt, RNAi
uucaauccgaaagauacgugg

SEQ ID NO: 40988 - DNA, 21 bp, Homo sapiens
aatccttcagcaattctaatc

SEQ ID NO: 40989 - RNA, 21 nt, RNAi
uccuucagcaauucuaaucuu

SEQ ID NO: 40990 - RNA, 21 nt, RNAi
uuaggaagucguuaagauuag

SEQ ID NO: 40991 - DNA, 21 bp, Homo sapiens
aaagcaatagactagaactga

SEQ ID NO: 40992 - RNA, 21 nt, RNAi
agcaauagacuagaacugauu

SEQ ID NO: 40993 - RNA, 21 nt, RNAi
uuucguuaucugaucuugacu

SEQ ID NO: 40994 - DNA, 21 bp, Homo sapiens
aagcaatagactagaactgaa

SEQ ID NO: 40995 - RNA, 21 nt, RNAi
gcaauagacuagaacugaauu

SEQ ID NO: 40996 - RNA, 21 nt, RNAi
uucguuaucugaucuugacuu

SEQ ID NO: 40997 - DNA, 21 bp, Homo sapiens
aattacaggaattctggtgat

SEQ ID NO: 40998 - RNA, 21 nt, RNAi
uuacaggaauucuggugauuu

SEQ ID NO: 40999 - RNA, 21 nt, RNAi
uuaauguccuuaagaccacua

SEQ ID NO: 41000 - DNA, 21 bp, Homo sapiens
aattctggtgatattaaggtg

SEQ ID NO: 41001 - RNA, 21 nt, RNAi
uucuggugauauuaagguguu

SEQ ID NO: 41002 - RNA, 21 nt, RNAi
uuaagaccacuauaauuccac

SEQ ID NO: 41003 - DNA, 21 bp, Homo sapiens
aacagttgatgtgacagtaag

SEQ ID NO: 41004 - RNA, 21 nt, RNAi
caguugaugugacaguaaguu

SEQ ID NO: 41005 - RNA, 21 nt, RNAi
uugucaacuacacugucauuc

SEQ ID NO: 41006 - DNA, 21 bp, Homo sapiens
aaatgcttctccaccaaataa

SEQ ID NO: 41007 - RNA, 21 nt, RNAi
augcuucuccaccaaauaauu

SEQ ID NO: 41008 - RNA, 21 nt, RNAi
uuuacgaagaggugguuuauu

SEQ ID NO: 41009 - DNA, 21 bp, Homo sapiens
aatgcttctccaccaaataag

SEQ ID NO: 41010 - RNA, 21 nt, RNAi
ugcuucuccaccaaauaaguu

SEQ ID NO: 41011 - RNA, 21 nt, RNAi
uuacgaagaggugguuuauuc

SEQ ID NO: 41012 - DNA, 21 bp, Homo sapiens
aaggagccagatggattgaaa

SEQ ID NO: 41013 - RNA, 21 nt, RNAi
ggagccagauggauugaaauu

SEQ ID NO: 41014 - RNA, 21 nt, RNAi
uuccucggucuaccuaacuuu

SEQ ID NO: 41015 - DNA, 21 bp, Homo sapiens
aaagatgtggaaataggcagc

SEQ ID NO: 41016 - RNA, 21 nt, RNAi
agauguggaaauaggcagcuu

SEQ ID NO: 41017 - RNA, 21 nt, RNAi
uuucuacaccuuuauccgucg

SEQ ID NO: 41018 - DNA, 21 bp, Homo sapiens
aagatgtggaaataggcagct

SEQ ID NO: 41019 - RNA, 21 nt, RNAi
gauguggaaauaggcagcuuu

SEQ ID NO: 41020 - RNA, 21 nt, RNAi
uucuacaccuuuauccgucga

SEQ ID NO: 41021 - DNA, 21 bp, Homo sapiens
aaataggcagctgtagatctt

SEQ ID NO: 41022 - RNA, 21 nt, RNAi
auaggcagcuguagaucuuuu

SEQ ID NO: 41023 - RNA, 21 nt, RNAi
uuuauccgucgacaucuagaa

SEQ ID NO: 41024 - DNA, 21 bp, Homo sapiens
aataggcagctgtagatcttg

SEQ ID NO: 41025 - RNA, 21 nt, RNAi
uaggcagcuguagaucuuguu

SEQ ID NO: 41026 - RNA, 21 nt, RNAi
uuauccgucgacaucuagaac

SEQ ID NO: 41027 - DNA, 21 bp, Homo sapiens
aatactgtcaaattgccacga

SEQ ID NO: 41028 - RNA, 21 nt, RNAi
uacugucaaauugccacgauu

SEQ ID NO: 41029 - RNA, 21 nt, RNAi
uuaugacaguuuaacggugcu

SEQ ID NO: 41030 - DNA, 21 bp, Homo sapiens
aaattgccacgatctcactaa

SEQ ID NO: 41031 - RNA, 21 nt, RNAi
auugccacgaucucacuaauu

SEQ ID NO: 41032 - RNA, 21 nt, RNAi
uuuaacggugcuagagugauu

SEQ ID NO: 41033 - DNA, 21 bp, Homo sapiens
aattgccacgatctcactaaa

SEQ ID NO: 41034 - RNA, 21 nt, RNAi
uugccacgaucucacuaaauu

SEQ ID NO: 41035 - RNA, 21 nt, RNAi
uuaacggugcuagagugauuu

SEQ ID NO: 41036 - DNA, 21 bp, Homo sapiens
aaaggatttctatttgctgtc

SEQ ID NO: 41037 - RNA, 21 nt, RNAi
aggauuucuauuugcugucuu

SEQ ID NO: 41038 - RNA, 21 nt, RNAi
uuuccuaaagauaaacgacag

SEQ ID NO: 41039 - DNA, 21 bp, Homo sapiens
aaggatttctatttgctgtca

SEQ ID NO: 41040 - RNA, 21 nt, RNAi
ggauuucuauuugcugucauu

SEQ ID NO: 41041 - RNA, 21 nt, RNAi
uuccuaaagauaaacgacagu

SEQ ID NO: 41042 - DNA, 21 bp, Homo sapiens
caccatggagcggaaagtgct

SEQ ID NO: 41043 - RNA, 21 nt, RNAi
ccauggagcggaaagugcuuu

SEQ ID NO: 41044 - RNA, 21 nt, RNAi
uugguaccucgccuuucacga

SEQ ID NO: 41045 - DNA, 21 bp, Homo sapiens
catggagcggaaagtgcttgc

SEQ ID NO: 41046 - RNA, 21 nt, RNAi
uggagcggaaagugcuugcuu

SEQ ID NO: 41047 - RNA, 21 nt, RNAi
uuaccucgccuuucacgaacg

SEQ ID NO: 41048 - DNA, 21 bp, Homo sapiens
caaggccaagaaggacaaagc

SEQ ID NO: 41049 - RNA, 21 nt, RNAi
aggccaagaaggacaaagcuu

SEQ ID NO: 41050 - RNA, 21 nt, RNAi
uuuccgguucuuccuguuucg

SEQ ID NO: 41051 - DNA, 21 bp, Homo sapiens
caaaggaaatctgaaactcag

SEQ ID NO: 41052 - RNA, 21 nt, RNAi
aaggaaaucugaaacucaguu

SEQ ID NO: 41053 - RNA, 21 nt, RNAi
uuuuccuuuagacuuugaguc

SEQ ID NO: 41054 - DNA, 21 bp, Homo sapiens
cactctgagagtgatctacca

SEQ ID NO: 41055 - RNA, 21 nt, RNAi
cucugagagugaucuaccauu

SEQ ID NO: 41056 - RNA, 21 nt, RNAi
uugagacucucacuagauggu

SEQ ID NO: 41057 - DNA, 21 bp, Homo sapiens
cagagcaggaagaggagattc

SEQ ID NO: 41058 - RNA, 21 nt, RNAi
gagcaggaagaggagauucuu

SEQ ID NO: 41059 - RNA, 21 nt, RNAi
uucucguccuucuccucuaag

SEQ ID NO: 41060 - DNA, 21 bp, Homo sapiens
catgtgatccgaaagttaggc

SEQ ID NO: 41061 - RNA, 21 nt, RNAi
ugugauccgaaaguuaggcuu

SEQ ID NO: 41062 - RNA, 21 nt, RNAi
uuacacuaggcuuucaauccg

SEQ ID NO: 41063 - DNA, 21 bp, Homo sapiens
cattacactgaaacagcacta

SEQ ID NO: 41064 - RNA, 21 nt, RNAi
uuacacugaaacagcacuauu

SEQ ID NO: 41065 - RNA, 21 nt, RNAi
uuaaugugacuuugucgugau

SEQ ID NO: 41066 - DNA, 21 bp, Homo sapiens
cactgaaacagcactagatga

SEQ ID NO: 41067 - RNA, 21 nt, RNAi
cugaaacagcacuagaugauu

SEQ ID NO: 41068 - RNA, 21 nt, RNAi
uugacuuugucgugaucuacu

SEQ ID NO: 41069 - DNA, 21 bp, Homo sapiens
cagcactagatgaaatccggt

SEQ ID NO: 41070 - RNA, 21 nt, RNAi
gcacuagaugaaauccgguuu

SEQ ID NO: 41071 - RNA, 21 nt, RNAi
uucgugaucuacuuuaggcca

SEQ ID NO: 41072 - DNA, 21 bp, Homo sapiens
cactagatgaaatccggttgc

SEQ ID NO: 41073 - RNA, 21 nt, RNAi
cuagaugaaauccgguugcuu

SEQ ID NO: 41074 - RNA, 21 nt, RNAi
uugaucuacuuuaggccaacg

SEQ ID NO: 41075 - DNA, 21 bp, Homo sapiens
caaatagagaaatggttgttc

SEQ ID NO: 41076 - RNA, 21 nt, RNAi
aauagagaaaugguuguucuu

SEQ ID NO: 41077 - RNA, 21 nt, RNAi
uuuuaucucuuuaccaacaag

SEQ ID NO: 41078 - DNA, 21 bp, Homo sapiens
caggagttaatggaacacata

SEQ ID NO: 41079 - RNA, 21 nt, RNAi
ggaguuaauggaacacauauu

SEQ ID NO: 41080 - RNA, 21 nt, RNAi
uuccucaauuaccuuguguau

SEQ ID NO: 41081 - DNA, 21 bp, Homo sapiens
cacatatctgcatggtatttg

SEQ ID NO: 41082 - RNA, 21 nt, RNAi
cauaucugcaugguauuuguu

SEQ ID NO: 41083 - RNA, 21 nt, RNAi
uuguauagacguaccauaaac

SEQ ID NO: 41084 - DNA, 21 bp, Homo sapiens
catatctgcatggtatttgaa

SEQ ID NO: 41085 - RNA, 21 nt, RNAi
uaucugcaugguauuugaauu

SEQ ID NO: 41086 - RNA, 21 nt, RNAi
uuauagacguaccauaaacuu

SEQ ID NO: 41087 - DNA, 21 bp, Homo sapiens
catcatctgctcaagtggatc

SEQ ID NO: 41088 - RNA, 21 nt, RNAi
ucaucugcucaaguggaucuu

SEQ ID NO: 41089 - RNA, 21 nt, RNAi
uuaguagacgaguucaccuag

SEQ ID NO: 41090 - DNA, 21 bp, Homo sapiens
catctgctcaagtggatcatc

SEQ ID NO: 41091 - RNA, 21 nt, RNAi
ucugcucaaguggaucaucuu

SEQ ID NO: 41092 - RNA, 21 nt, RNAi
uuagacgaguucaccuaguag

SEQ ID NO: 41093 - DNA, 21 bp, Homo sapiens
caagtggatcatcaaatccaa

SEQ ID NO: 41094 - RNA, 21 nt, RNAi
aguggaucaucaaauccaauu

SEQ ID NO: 41095 - RNA, 21 nt, RNAi
uuucaccuaguaguuuagguu

SEQ ID NO: 41096 - DNA, 21 bp, Homo sapiens
cataccaagtgccgtatcatc

SEQ ID NO: 41097 - RNA, 21 nt, RNAi
uaccaagugccguaucaucuu

SEQ ID NO: 41098 - RNA, 21 nt, RNAi
uuaugguucacggcauaguag

SEQ ID NO: 41099 - DNA, 21 bp, Homo sapiens
caagtgccgtatcatccacac

SEQ ID NO: 41100 - RNA, 21 nt, RNAi
agugccguaucauccacacuu

SEQ ID NO: 41101 - RNA, 21 nt, RNAi
uuucacggcauaguaggugug

SEQ ID NO: 41102 - DNA, 21 bp, Homo sapiens
catccacactgacattaaacc

SEQ ID NO: 41103 - RNA, 21 nt, RNAi
uccacacugacauuaaaccuu

SEQ ID NO: 41104 - RNA, 21 nt, RNAi
uuaggugugacuguaauuugg

SEQ ID NO: 41105 - DNA, 21 bp, Homo sapiens
cacactgacattaaaccagag

SEQ ID NO: 41106 - RNA, 21 nt, RNAi
cacugacauuaaaccagaguu

SEQ ID NO: 41107 - RNA, 21 nt, RNAi
uugugacuguaauuuggucuc

SEQ ID NO: 41108 - DNA, 21 bp, Homo sapiens
cactgacattaaaccagagaa

SEQ ID NO: 41109 - RNA, 21 nt, RNAi
cugacauuaaaccagagaauu

SEQ ID NO: 41110 - RNA, 21 nt, RNAi
uugacuguaauuuggucucuu

SEQ ID NO: 41111 - DNA, 21 bp, Homo sapiens
cattaaaccagagaacatctt

SEQ ID NO: 41112 - RNA, 21 nt, RNAi
uuaaaccagagaacaucuuuu

SEQ ID NO: 41113 - RNA, 21 nt, RNAi
uuaauuuggucucuuguagaa

SEQ ID NO: 41114 - DNA, 21 bp, Homo sapiens
cagagaacatcttattgtcag

SEQ ID NO: 41115 - RNA, 21 nt, RNAi
gagaacaucuuauugucaguu

SEQ ID NO: 41116 - RNA, 21 nt, RNAi
uucucuuguagaauaacaguc

SEQ ID NO: 41117 - DNA, 21 bp, Homo sapiens
catcttattgtcagtgaatga

SEQ ID NO: 41118 - RNA, 21 nt, RNAi
ucuuauugucagugaaugauu

SEQ ID NO: 41119 - RNA, 21 nt, RNAi
uuagaauaacagucacuuacu

SEQ ID NO: 41120 - DNA, 21 bp, Homo sapiens
cagtgaatgagcagtacattc

SEQ ID NO: 41121 - RNA, 21 nt, RNAi
gugaaugagcaguacauucuu

SEQ ID NO: 41122 - RNA, 21 nt, RNAi
uucacuuacucgucauguaag

SEQ ID NO: 41123 - DNA, 21 bp, Homo sapiens
cagtacattcggaggctggct

SEQ ID NO: 41124 - RNA, 21 nt, RNAi
guacauucggaggcuggcuuu

SEQ ID NO: 41125 - RNA, 21 nt, RNAi
uucauguaagccuccgaccga

SEQ ID NO: 41126 - DNA, 21 bp, Homo sapiens
cattcggaggctggctgcaga

SEQ ID NO: 41127 - RNA, 21 nt, RNAi
uucggaggcuggcugcagauu

SEQ ID NO: 41128 - RNA, 21 nt, RNAi
uuaagccuccgaccgacgucu

SEQ ID NO: 41129 - DNA, 21 bp, Homo sapiens
cagaagcaacagaatggcagc

SEQ ID NO: 41130 - RNA, 21 nt, RNAi
gaagcaacagaauggcagcuu

SEQ ID NO: 41131 - RNA, 21 nt, RNAi
uucuucguugucuuaccgucg

SEQ ID NO: 41132 - DNA, 21 bp, Homo sapiens
caacagaatggcagcgatctg

SEQ ID NO: 41133 - RNA, 21 nt, RNAi
acagaauggcagcgaucuguu

SEQ ID NO: 41134 - RNA, 21 nt, RNAi
uuugucuuaccgucgcuagac

SEQ ID NO: 41135 - DNA, 21 bp, Homo sapiens
cagaatggcagcgatctggag

SEQ ID NO: 41136 - RNA, 21 nt, RNAi
gaauggcagcgaucuggaguu

SEQ ID NO: 41137 - RNA, 21 nt, RNAi
uucuuaccgucgcuagaccuc

SEQ ID NO: 41138 - DNA, 21 bp, Homo sapiens
cagcctaaaccagctgacaaa

SEQ ID NO: 41139 - RNA, 21 nt, RNAi
gccuaaaccagcugacaaauu

SEQ ID NO: 41140 - RNA, 21 nt, RNAi
uucggauuuggucgacuguuu

SEQ ID NO: 41141 - DNA, 21 bp, Homo sapiens
cagaagcgccaggcagaatta

SEQ ID NO: 41142 - RNA, 21 nt, RNAi
gaagcgccaggcagaauuauu

SEQ ID NO: 41143 - RNA, 21 nt, RNAi
uucuucgcgguccgucuuaau

SEQ ID NO: 41144 - DNA, 21 bp, Homo sapiens
caggcagaattactagagaag

SEQ ID NO: 41145 - RNA, 21 nt, RNAi
ggcagaauuacuagagaaguu

SEQ ID NO: 41146 - RNA, 21 nt, RNAi
uuccgucuuaaugaucucuuc

SEQ ID NO: 41147 - DNA, 21 bp, Homo sapiens
cagaattactagagaagcgaa

SEQ ID NO: 41148 - RNA, 21 nt, RNAi
gaauuacuagagaagcgaauu

SEQ ID NO: 41149 - RNA, 21 nt, RNAi
uucuuaaugaucucuucgcuu

SEQ ID NO: 41150 - DNA, 21 bp, Homo sapiens
caggaaattgaggaaatggag

SEQ ID NO: 41151 - RNA, 21 nt, RNAi
ggaaauugaggaaauggaguu

SEQ ID NO: 41152 - RNA, 21 nt, RNAi
uuccuuuaacuccuuuaccuc

SEQ ID NO: 41153 - DNA, 21 bp, Homo sapiens
caaacaagcaagaagaatcag

SEQ ID NO: 41154 - RNA, 21 nt, RNAi
aacaagcaagaagaaucaguu

SEQ ID NO: 41155 - RNA, 21 nt, RNAi
uuuuguucguucuucuuaguc

SEQ ID NO: 41156 - DNA, 21 bp, Homo sapiens
caagcaagaagaatcagagag

SEQ ID NO: 41157 - RNA, 21 nt, RNAi
agcaagaagaaucagagaguu

SEQ ID NO: 41158 - RNA, 21 nt, RNAi
uuucguucuucuuagucucuc

SEQ ID NO: 41159 - DNA, 21 bp, Homo sapiens
caagaagaatcagagagtcct

SEQ ID NO: 41160 - RNA, 21 nt, RNAi
agaagaaucagagaguccuuu

SEQ ID NO: 41161 - RNA, 21 nt, RNAi
uuucuucuuagucucucagga

SEQ ID NO: 41162 - DNA, 21 bp, Homo sapiens
cagagagtcctgttgaaagac

SEQ ID NO: 41163 - RNA, 21 nt, RNAi
gagaguccuguugaaagacuu

SEQ ID NO: 41164 - RNA, 21 nt, RNAi
uucucucaggacaacuuucug

SEQ ID NO: 41165 - DNA, 21 bp, Homo sapiens
caagtaccattggccaggatc

SEQ ID NO: 41166 - RNA, 21 nt, RNAi
aguaccauuggccaggaucuu

SEQ ID NO: 41167 - RNA, 21 nt, RNAi
uuucaugguaaccgguccuag

SEQ ID NO: 41168 - DNA, 21 bp, Homo sapiens
cattggccaggatcaaacgct

SEQ ID NO: 41169 - RNA, 21 nt, RNAi
uuggccaggaucaaacgcuuu

SEQ ID NO: 41170 - RNA, 21 nt, RNAi
uuaaccgguccuaguuugcga

SEQ ID NO: 41171 - DNA, 21 bp, Homo sapiens
caggatcaaacgcttatggaa

SEQ ID NO: 41172 - RNA, 21 nt, RNAi
ggaucaaacgcuuauggaauu

SEQ ID NO: 41173 - RNA, 21 nt, RNAi
uuccuaguuugcgaauaccuu

SEQ ID NO: 41174 - DNA, 21 bp, Homo sapiens
caaacgcttatggaacgtgat

SEQ ID NO: 41175 - RNA, 21 nt, RNAi
aacgcuuauggaacgugauuu

SEQ ID NO: 41176 - RNA, 21 nt, RNAi
uuuugcgaauaccuugcacua

SEQ ID NO: 41177 - DNA, 21 bp, Homo sapiens
cagcagaaattaattgcaatg

SEQ ID NO: 41178 - RNA, 21 nt, RNAi
gcagaaauuaauugcaauguu

SEQ ID NO: 41179 - RNA, 21 nt, RNAi
uucgucuuuaauuaacguuac

SEQ ID NO: 41180 - DNA, 21 bp, Homo sapiens
cagaaattaattgcaatggag

SEQ ID NO: 41181 - RNA, 21 nt, RNAi
gaaauuaauugcaauggaguu

SEQ ID NO: 41182 - RNA, 21 nt, RNAi
uucuuuaauuaacguuaccuc

SEQ ID NO: 41183 - DNA, 21 bp, Homo sapiens
caatggagtgattgaagtcat

SEQ ID NO: 41184 - RNA, 21 nt, RNAi
auggagugauugaagucauuu

SEQ ID NO: 41185 - RNA, 21 nt, RNAi
uuuaccucacuaacuucagua

SEQ ID NO: 41186 - DNA, 21 bp, Homo sapiens
cattgagacataaagaggatc

SEQ ID NO: 41187 - RNA, 21 nt, RNAi
uugagacauaaagaggaucuu

SEQ ID NO: 41188 - RNA, 21 nt, RNAi
uuaacucuguauuucuccuag

SEQ ID NO: 41189 - DNA, 21 bp, Homo sapiens
cataatgctaatgactgtgat

SEQ ID NO: 41190 - RNA, 21 nt, RNAi
uaaugcuaaugacugugauuu

SEQ ID NO: 41191 - RNA, 21 nt, RNAi
uuauuacgauuacugacacua

SEQ ID NO: 41192 - DNA, 21 bp, Homo sapiens
caggaatctagtttcctaagc

SEQ ID NO: 41193 - RNA, 21 nt, RNAi
ggaaucuaguuuccuaagcuu

SEQ ID NO: 41194 - RNA, 21 nt, RNAi
uuccuuagaucaaaggauucg

SEQ ID NO: 41195 - DNA, 21 bp, Homo sapiens
cagcagcacatctcaagaaac

SEQ ID NO: 41196 - RNA, 21 nt, RNAi
gcagcacaucucaagaaacuu

SEQ ID NO: 41197 - RNA, 21 nt, RNAi
uucgucguguagaguucuuug

SEQ ID NO: 41198 - DNA, 21 bp, Homo sapiens
cagcacatctcaagaaacaga

SEQ ID NO: 41199 - RNA, 21 nt, RNAi
gcacaucucaagaaacagauu

SEQ ID NO: 41200 - RNA, 21 nt, RNAi
uucguguagaguucuuugucu

SEQ ID NO: 41201 - DNA, 21 bp, Homo sapiens
cacatctcaagaaacagactc

SEQ ID NO: 41202 - RNA, 21 nt, RNAi
caucucaagaaacagacucuu

SEQ ID NO: 41203 - RNA, 21 nt, RNAi
uuguagaguucuuugucugag

SEQ ID NO: 41204 - DNA, 21 bp, Homo sapiens
catctcaagaaacagactctt

SEQ ID NO: 41205 - RNA, 21 nt, RNAi
ucucaagaaacagacucuuuu

SEQ ID NO: 41206 - RNA, 21 nt, RNAi
uuagaguucuuugucugagaa

SEQ ID NO: 41207 - DNA, 21 bp, Homo sapiens
caagaaacagactcttgtaca

SEQ ID NO: 41208 - RNA, 21 nt, RNAi
agaaacagacucuuguacauu

SEQ ID NO: 41209 - RNA, 21 nt, RNAi
uuucuuugucugagaacaugu

SEQ ID NO: 41210 - DNA, 21 bp, Homo sapiens
cagactcttgtacacctataa

SEQ ID NO: 41211 - RNA, 21 nt, RNAi
gacucuuguacaccuauaauu

SEQ ID NO: 41212 - RNA, 21 nt, RNAi
uucugagaacauguggauauu

SEQ ID NO: 41213 - DNA, 21 bp, Homo sapiens
cacctataacatctgaggtgt

SEQ ID NO: 41214 - RNA, 21 nt, RNAi
ccuauaacaucugagguguuu

SEQ ID NO: 41215 - RNA, 21 nt, RNAi
uuggauauuguagacuccaca

SEQ ID NO: 41216 - DNA, 21 bp, Homo sapiens
catctgaggtgtcagacacca

SEQ ID NO: 41217 - RNA, 21 nt, RNAi
ucugaggugucagacaccauu

SEQ ID NO: 41218 - RNA, 21 nt, RNAi
uuagacuccacagucuguggu

SEQ ID NO: 41219 - DNA, 21 bp, Homo sapiens
cagacaccatggtgtgccagt

SEQ ID NO: 41220 - RNA, 21 nt, RNAi
gacaccauggugugccaguuu

SEQ ID NO: 41221 - RNA, 21 nt, RNAi
uucugugguaccacacgguca

SEQ ID NO: 41222 - DNA, 21 bp, Homo sapiens
caccatggtgtgccagtcttc

SEQ ID NO: 41223 - RNA, 21 nt, RNAi
ccauggugugccagucuucuu

SEQ ID NO: 41224 - RNA, 21 nt, RNAi
uugguaccacacggucagaag

SEQ ID NO: 41225 - DNA, 21 bp, Homo sapiens
catggtgtgccagtcttcctc

SEQ ID NO: 41226 - RNA, 21 nt, RNAi
uggugugccagucuuccucuu

SEQ ID NO: 41227 - RNA, 21 nt, RNAi
uuaccacacggucagaaggag

SEQ ID NO: 41228 - DNA, 21 bp, Homo sapiens
cagtcttcctcaactgtaggt

SEQ ID NO: 41229 - RNA, 21 nt, RNAi
gucuuccucaacuguagguuu

SEQ ID NO: 41230 - RNA, 21 nt, RNAi
uucagaaggaguugacaucca

SEQ ID NO: 41231 - DNA, 21 bp, Homo sapiens
caactgtaggtcagtcattca

SEQ ID NO: 41232 - RNA, 21 nt, RNAi
acuguaggucagucauucauu

SEQ ID NO: 41233 - RNA, 21 nt, RNAi
uuugacauccagucaguaagu

SEQ ID NO: 41234 - DNA, 21 bp, Homo sapiens
cagtcattcagtgaacaacac

SEQ ID NO: 41235 - RNA, 21 nt, RNAi
gucauucagugaacaacacuu

SEQ ID NO: 41236 - RNA, 21 nt, RNAi
uucaguaagucacuuguugug

SEQ ID NO: 41237 - DNA, 21 bp, Homo sapiens
cattcagtgaacaacacatta

SEQ ID NO: 41238 - RNA, 21 nt, RNAi
uucagugaacaacacauuauu

SEQ ID NO: 41239 - RNA, 21 nt, RNAi
uuaagucacuuguuguguaau

SEQ ID NO: 41240 - DNA, 21 bp, Homo sapiens
cagtgaacaacacattagcca

SEQ ID NO: 41241 - RNA, 21 nt, RNAi
gugaacaacacauuagccauu

SEQ ID NO: 41242 - RNA, 21 nt, RNAi
uucacuuguuguguaaucggu

SEQ ID NO: 41243 - DNA, 21 bp, Homo sapiens
caacacattagccaacttcaa

SEQ ID NO: 41244 - RNA, 21 nt, RNAi
acacauuagccaacuucaauu

SEQ ID NO: 41245 - RNA, 21 nt, RNAi
uuuguguaaucgguugaaguu

SEQ ID NO: 41246 - DNA, 21 bp, Homo sapiens
cacattagccaacttcaagaa

SEQ ID NO: 41247 - RNA, 21 nt, RNAi
cauuagccaacuucaagaauu

SEQ ID NO: 41248 - RNA, 21 nt, RNAi
uuguaaucgguugaaguucuu

SEQ ID NO: 41249 - DNA, 21 bp, Homo sapiens
cattagccaacttcaagaaag

SEQ ID NO: 41250 - RNA, 21 nt, RNAi
uuagccaacuucaagaaaguu

SEQ ID NO: 41251 - RNA, 21 nt, RNAi
uuaaucgguugaaguucuuuc

SEQ ID NO: 41252 - DNA, 21 bp, Homo sapiens
caacttcaagaaagcattcgg

SEQ ID NO: 41253 - RNA, 21 nt, RNAi
acuucaagaaagcauucgguu

SEQ ID NO: 41254 - RNA, 21 nt, RNAi
uuugaaguucuuucguaagcc

SEQ ID NO: 41255 - DNA, 21 bp, Homo sapiens
caagagcaagaacataacgga

SEQ ID NO: 41256 - RNA, 21 nt, RNAi
agagcaagaacauaacggauu

SEQ ID NO: 41257 - RNA, 21 nt, RNAi
uuucucguucuuguauugccu

SEQ ID NO: 41258 - DNA, 21 bp, Homo sapiens
caagaacataacggaccactg

SEQ ID NO: 41259 - RNA, 21 nt, RNAi
agaacauaacggaccacuguu

SEQ ID NO: 41260 - RNA, 21 nt, RNAi
uuucuuguauugccuggugac

SEQ ID NO: 41261 - DNA, 21 bp, Homo sapiens
cataacggaccactggacaac

SEQ ID NO: 41262 - RNA, 21 nt, RNAi
uaacggaccacuggacaacuu

SEQ ID NO: 41263 - RNA, 21 nt, RNAi
uuauugccuggugaccuguug

SEQ ID NO: 41264 - DNA, 21 bp, Homo sapiens
caaggtgaagattgctgacct

SEQ ID NO: 41265 - RNA, 21 nt, RNAi
aggugaagauugcugaccuuu

SEQ ID NO: 41266 - RNA, 21 nt, RNAi
uuuccacuucuaacgacugga

SEQ ID NO: 41267 - DNA, 21 bp, Homo sapiens
cacaaacatttcactgaagat

SEQ ID NO: 41268 - RNA, 21 nt, RNAi
caaacauuucacugaagauuu

SEQ ID NO: 41269 - RNA, 21 nt, RNAi
uuguuuguaaagugacuucua

SEQ ID NO: 41270 - DNA, 21 bp, Homo sapiens
cactgaagatattcaaacaag

SEQ ID NO: 41271 - RNA, 21 nt, RNAi
cugaagauauucaaacaaguu

SEQ ID NO: 41272 - RNA, 21 nt, RNAi
uugacuucuauaaguuuguuc

SEQ ID NO: 41273 - DNA, 21 bp, Homo sapiens
caaacaaggcaatatcgttcc

SEQ ID NO: 41274 - RNA, 21 nt, RNAi
aacaaggcaauaucguuccuu

SEQ ID NO: 41275 - RNA, 21 nt, RNAi
uuuuguuccguuauagcaagg

SEQ ID NO: 41276 - DNA, 21 bp, Homo sapiens
caaggcaatatcgttccttgg

SEQ ID NO: 41277 - RNA, 21 nt, RNAi
aggcaauaucguuccuugguu

SEQ ID NO: 41278 - RNA, 21 nt, RNAi
uuuccguuauagcaaggaacc

SEQ ID NO: 41279 - DNA, 21 bp, Homo sapiens
caatatcgttccttggaagtt

SEQ ID NO: 41280 - RNA, 21 nt, RNAi
auaucguuccuuggaaguuuu

SEQ ID NO: 41281 - RNA, 21 nt, RNAi
uuuauagcaaggaaccuucaa

SEQ ID NO: 41282 - DNA, 21 bp, Homo sapiens
catttggagcacggcatgcat

SEQ ID NO: 41283 - RNA, 21 nt, RNAi
uuuggagcacggcaugcauuu

SEQ ID NO: 41284 - RNA, 21 nt, RNAi
uuaaaccucgugccguacgua

SEQ ID NO: 41285 - DNA, 21 bp, Homo sapiens
cacggcatgcatggcctttga

SEQ ID NO: 41286 - RNA, 21 nt, RNAi
cggcaugcauggccuuugauu

SEQ ID NO: 41287 - RNA, 21 nt, RNAi
uugccguacguaccggaaacu

SEQ ID NO: 41288 - DNA, 21 bp, Homo sapiens
catgcatggcctttgaactgg

SEQ ID NO: 41289 - RNA, 21 nt, RNAi
ugcauggccuuugaacugguu

SEQ ID NO: 41290 - RNA, 21 nt, RNAi
uuacguaccggaaacuugacc

SEQ ID NO: 41291 - DNA, 21 bp, Homo sapiens
catggcctttgaactggccac

SEQ ID NO: 41292 - RNA, 21 nt, RNAi
uggccuuugaacuggccacuu

SEQ ID NO: 41293 - RNA, 21 nt, RNAi
uuaccggaaacuugaccggug

SEQ ID NO: 41294 - DNA, 21 bp, Homo sapiens
cacaggtgactatttgtttga

SEQ ID NO: 41295 - RNA, 21 nt, RNAi
caggugacuauuuguuugauu

SEQ ID NO: 41296 - RNA, 21 nt, RNAi
uuguccacugauaaacaaacu

SEQ ID NO: 41297 - DNA, 21 bp, Homo sapiens
caggtgactatttgtttgaac

SEQ ID NO: 41298 - RNA, 21 nt, RNAi
ggugacuauuuguuugaacuu

SEQ ID NO: 41299 - RNA, 21 nt, RNAi
uuccacugauaaacaaacuug

SEQ ID NO: 41300 - DNA, 21 bp, Homo sapiens
cactcgagatgaagatcacat

SEQ ID NO: 41301 - RNA, 21 nt, RNAi
cucgagaugaagaucacauuu

SEQ ID NO: 41302 - RNA, 21 nt, RNAi
uugagcucuacuucuagugua

SEQ ID NO: 41303 - DNA, 21 bp, Homo sapiens
cacattgcattgatcatagaa

SEQ ID NO: 41304 - RNA, 21 nt, RNAi
cauugcauugaucauagaauu

SEQ ID NO: 41305 - RNA, 21 nt, RNAi
uuguaacguaacuaguaucuu

SEQ ID NO: 41306 - DNA, 21 bp, Homo sapiens
cattgcattgatcatagaact

SEQ ID NO: 41307 - RNA, 21 nt, RNAi
uugcauugaucauagaacuuu

SEQ ID NO: 41308 - RNA, 21 nt, RNAi
uuaacguaacuaguaucuuga

SEQ ID NO: 41309 - DNA, 21 bp, Homo sapiens
cattgatcatagaacttctgg

SEQ ID NO: 41310 - RNA, 21 nt, RNAi
uugaucauagaacuucugguu

SEQ ID NO: 41311 - RNA, 21 nt, RNAi
uuaacuaguaucuugaagacc

SEQ ID NO: 41312 - DNA, 21 bp, Homo sapiens
caagctcattgtggcaggaaa

SEQ ID NO: 41313 - RNA, 21 nt, RNAi
agcucauuguggcaggaaauu

SEQ ID NO: 41314 - RNA, 21 nt, RNAi
uuucgaguaacaccguccuuu

SEQ ID NO: 41315 - DNA, 21 bp, Homo sapiens
catatcacgaagctgaaacct

SEQ ID NO: 41316 - RNA, 21 nt, RNAi
uaucacgaagcugaaaccuuu

SEQ ID NO: 41317 - RNA, 21 nt, RNAi
uuauagugcuucgacuuugga

SEQ ID NO: 41318 - DNA, 21 bp, Homo sapiens
caggaagaggcagctggcttc

SEQ ID NO: 41319 - RNA, 21 nt, RNAi
ggaagaggcagcuggcuucuu

SEQ ID NO: 41320 - RNA, 21 nt, RNAi
uuccuucuccgucgaccgaag

SEQ ID NO: 41321 - DNA, 21 bp, Homo sapiens
cagctggcttcacagatttct

SEQ ID NO: 41322 - RNA, 21 nt, RNAi
gcuggcuucacagauuucuuu

SEQ ID NO: 41323 - RNA, 21 nt, RNAi
uucgaccgaagugucuaaaga

SEQ ID NO: 41324 - DNA, 21 bp, Homo sapiens
cagcaccacagcagagatcac

SEQ ID NO: 41325 - RNA, 21 nt, RNAi
gcaccacagcagagaucacuu

SEQ ID NO: 41326 - RNA, 21 nt, RNAi
uucguggugucgucucuagug

SEQ ID NO: 41327 - DNA, 21 bp, Homo sapiens
caccacagcagagatcacaca

SEQ ID NO: 41328 - RNA, 21 nt, RNAi
ccacagcagagaucacacauu

SEQ ID NO: 41329 - RNA, 21 nt, RNAi
uuggugucgucucuagugugu

SEQ ID NO: 41330 - DNA, 21 bp, Homo sapiens
cacagcagagatcacacactg

SEQ ID NO: 41331 - RNA, 21 nt, RNAi
cagcagagaucacacacuguu

SEQ ID NO: 41332 - RNA, 21 nt, RNAi
uugucgucucuagugugugac

SEQ ID NO: 41333 - DNA, 21 bp, Homo sapiens
cagcagagatcacacactgac

SEQ ID NO: 41334 - RNA, 21 nt, RNAi
gcagagaucacacacugacuu

SEQ ID NO: 41335 - RNA, 21 nt, RNAi
uucgucucuagugugugacug

SEQ ID NO: 41336 - DNA, 21 bp, Homo sapiens
caagagtttctagatcttgtt

SEQ ID NO: 41337 - RNA, 21 nt, RNAi
agaguuucuagaucuuguuuu

SEQ ID NO: 41338 - RNA, 21 nt, RNAi
uuucucaaagaucuagaacaa

SEQ ID NO: 41339 - DNA, 21 bp, Homo sapiens
catcctaggtgaatttggcct

SEQ ID NO: 41340 - RNA, 21 nt, RNAi
uccuaggugaauuuggccuuu

SEQ ID NO: 41341 - RNA, 21 nt, RNAi
uuaggauccacuuaaaccgga

SEQ ID NO: 41342 - DNA, 21 bp, Homo sapiens
cattgactctaagagtcaaat

SEQ ID NO: 41343 - RNA, 21 nt, RNAi
uugacucuaagagucaaauuu

SEQ ID NO: 41344 - RNA, 21 nt, RNAi
uuaacugagauucucaguuua

SEQ ID NO: 41345 - DNA, 21 bp, Homo sapiens
catatcctattgccagcataa

SEQ ID NO: 41346 - RNA, 21 nt, RNAi
uauccuauugccagcauaauu

SEQ ID NO: 41347 - RNA, 21 nt, RNAi
uuauaggauaacggucguauu

SEQ ID NO: 41348 - DNA, 21 bp, Homo sapiens
cagcagagacattaaacttgc

SEQ ID NO: 41349 - RNA, 21 nt, RNAi
gcagagacauuaaacuugcuu

SEQ ID NO: 41350 - RNA, 21 nt, RNAi
uucgucucuguaauuugaacg

SEQ ID NO: 41351 - DNA, 21 bp, Homo sapiens
cagagacattaaacttgctgt

SEQ ID NO: 41352 - RNA, 21 nt, RNAi
gagacauuaaacuugcuguuu

SEQ ID NO: 41353 - RNA, 21 nt, RNAi
uucucuguaauuugaacgaca

SEQ ID NO: 41354 - DNA, 21 bp, Homo sapiens
cattaaacttgctgtgtccgg

SEQ ID NO: 41355 - RNA, 21 nt, RNAi
uuaaacuugcuguguccgguu

SEQ ID NO: 41356 - RNA, 21 nt, RNAi
uuaauuugaacgacacaggcc

SEQ ID NO: 41357 - DNA, 21 bp, Homo sapiens
catcatcttcctggactgttt

SEQ ID NO: 41358 - RNA, 21 nt, RNAi
ucaucuuccuggacuguuuuu

SEQ ID NO: 41359 - RNA, 21 nt, RNAi
uuaguagaaggaccugacaaa

SEQ ID NO: 41360 - DNA, 21 bp, Homo sapiens
catcttcctggactgtttctg

SEQ ID NO: 41361 - RNA, 21 nt, RNAi
ucuuccuggacuguuucuguu

SEQ ID NO: 41362 - RNA, 21 nt, RNAi
uuagaaggaccugacaaagac

SEQ ID NO: 41363 - DNA, 21 bp, Homo sapiens
cactgttcaaagcactgtcaa

SEQ ID NO: 41364 - RNA, 21 nt, RNAi
cuguucaaagcacugucaauu

SEQ ID NO: 41365 - RNA, 21 nt, RNAi
uugacaaguuucgugacaguu

SEQ ID NO: 41366 - DNA, 21 bp, Homo sapiens
caaagcactgtcaaattcctt

SEQ ID NO: 41367 - RNA, 21 nt, RNAi
aagcacugucaaauuccuuuu

SEQ ID NO: 41368 - RNA, 21 nt, RNAi
uuuucgugacaguuuaaggaa

SEQ ID NO: 41369 - DNA, 21 bp, Homo sapiens
cactgtcaaattcctttcatc

SEQ ID NO: 41370 - RNA, 21 nt, RNAi
cugucaaauuccuuucaucuu

SEQ ID NO: 41371 - RNA, 21 nt, RNAi
uugacaguuuaaggaaaguag

SEQ ID NO: 41372 - DNA, 21 bp, Homo sapiens
caggtgttctataaacagtcc

SEQ ID NO: 41373 - RNA, 21 nt, RNAi
gguguucuauaaacaguccuu

SEQ ID NO: 41374 - RNA, 21 nt, RNAi
uuccacaagauauuugucagg

SEQ ID NO: 41375 - DNA, 21 bp, Homo sapiens
cagtcctttcctgtatgtctt

SEQ ID NO: 41376 - RNA, 21 nt, RNAi
guccuuuccuguaugucuuuu

SEQ ID NO: 41377 - RNA, 21 nt, RNAi
uucaggaaaggacauacagaa

SEQ ID NO: 41378 - DNA, 21 bp, Homo sapiens
catggctggcactttactcat

SEQ ID NO: 41379 - RNA, 21 nt, RNAi
uggcuggcacuuuacucauuu

SEQ ID NO: 41380 - RNA, 21 nt, RNAi
uuaccgaccgugaaaugagua

SEQ ID NO: 41381 - DNA, 21 bp, Homo sapiens
cactttactcattgcacttga

SEQ ID NO: 41382 - RNA, 21 nt, RNAi
cuuuacucauugcacuugauu

SEQ ID NO: 41383 - RNA, 21 nt, RNAi
uugaaaugaguaacgugaacu

SEQ ID NO: 41384 - DNA, 21 bp, Homo sapiens
cattgcacttgagtttattgc

SEQ ID NO: 41385 - RNA, 21 nt, RNAi
uugcacuugaguuuauugcuu

SEQ ID NO: 41386 - RNA, 21 nt, RNAi
uuaacgugaacucaaauaacg

SEQ ID NO: 41387 - DNA, 21 bp, Homo sapiens
cataactaaaggatcaggatg

SEQ ID NO: 41388 - RNA, 21 nt, RNAi
uaacuaaaggaucaggauguu

SEQ ID NO: 41389 - RNA, 21 nt, RNAi
uuauugauuuccuaguccuac

SEQ ID NO: 41390 - DNA, 21 bp, Homo sapiens
caggatgatggtagaacggag

SEQ ID NO: 41391 - RNA, 21 nt, RNAi
ggaugaugguagaacggaguu

SEQ ID NO: 41392 - RNA, 21 nt, RNAi
uuccuacuaccaucuugccuc

SEQ ID NO: 41393 - DNA, 21 bp, Homo sapiens
cagaggctcgagtctttaata

SEQ ID NO: 41394 - RNA, 21 nt, RNAi
gaggcucgagucuuuaauauu

SEQ ID NO: 41395 - RNA, 21 nt, RNAi
uucuccgagcucagaaauuau

SEQ ID NO: 41396 - DNA, 21 bp, Homo sapiens
catgattgagatgtacttgag

SEQ ID NO: 41397 - RNA, 21 nt, RNAi
ugauugagauguacuugaguu

SEQ ID NO: 41398 - RNA, 21 nt, RNAi
uuacuaacucuacaugaacuc

SEQ ID NO: 41399 - DNA, 21 bp, Homo sapiens
catattcctccagtaagtaat

SEQ ID NO: 41400 - RNA, 21 nt, RNAi
uauuccuccaguaaguaauuu

SEQ ID NO: 41401 - RNA, 21 nt, RNAi
uuauaaggaggucauucauua

SEQ ID NO: 41402 - DNA, 21 bp, Homo sapiens
cagtaagtaatactgaagagc

SEQ ID NO: 41403 - RNA, 21 nt, RNAi
guaaguaauacugaagagcuu

SEQ ID NO: 41404 - RNA, 21 nt, RNAi
uucauucauuaugacuucucg

SEQ ID NO: 41405 - DNA, 21 bp, Homo sapiens
cacagccgcttcttcagcatg

SEQ ID NO: 41406 - RNA, 21 nt, RNAi
cagccgcuucuucagcauguu

SEQ ID NO: 41407 - RNA, 21 nt, RNAi
uugucggcgaagaagucguac

SEQ ID NO: 41408 - DNA, 21 bp, Homo sapiens
cagccgcttcttcagcatgga

SEQ ID NO: 41409 - RNA, 21 nt, RNAi
gccgcuucuucagcauggauu

SEQ ID NO: 41410 - RNA, 21 nt, RNAi
uucggcgaagaagucguaccu

SEQ ID NO: 41411 - DNA, 21 bp, Homo sapiens
cagcgttctcgaagtggctgt

SEQ ID NO: 41412 - RNA, 21 nt, RNAi
gcguucucgaaguggcuguuu

SEQ ID NO: 41413 - RNA, 21 nt, RNAi
uucgcaagagcuucaccgaca

SEQ ID NO: 41414 - DNA, 21 bp, Homo sapiens
cagaaagccacagaggtgcaa

SEQ ID NO: 41415 - RNA, 21 nt, RNAi
gaaagccacagaggugcaauu

SEQ ID NO: 41416 - RNA, 21 nt, RNAi
uucuuucggugucuccacguu

SEQ ID NO: 41417 - DNA, 21 bp, Homo sapiens
cacagaggtgcaacttgaggc

SEQ ID NO: 41418 - RNA, 21 nt, RNAi
cagaggugcaacuugaggcuu

SEQ ID NO: 41419 - RNA, 21 nt, RNAi
uugucuccacguugaacuccg

SEQ ID NO: 41420 - DNA, 21 bp, Homo sapiens
cagaggtgcaacttgaggctc

SEQ ID NO: 41421 - RNA, 21 nt, RNAi
gaggugcaacuugaggcucuu

SEQ ID NO: 41422 - RNA, 21 nt, RNAi
uucuccacguugaacuccgag

SEQ ID NO: 41423 - DNA, 21 bp, Homo sapiens
caacttgaggctctgctagca

SEQ ID NO: 41424 - RNA, 21 nt, RNAi
acuugaggcucugcuagcauu

SEQ ID NO: 41425 - RNA, 21 nt, RNAi
uuugaacuccgagacgaucgu

SEQ ID NO: 41426 - DNA, 21 bp, Homo sapiens
caagccaccagtgaggctatt

SEQ ID NO: 41427 - RNA, 21 nt, RNAi
agccaccagugaggcuauuuu

SEQ ID NO: 41428 - RNA, 21 nt, RNAi
uuucgguggucacuccgauaa

SEQ ID NO: 41429 - DNA, 21 bp, Homo sapiens
cacctttctatacaggagatt

SEQ ID NO: 41430 - RNA, 21 nt, RNAi
ccuuucuauacaggagauuuu

SEQ ID NO: 41431 - RNA, 21 nt, RNAi
uuggaaagauauguccucuaa

SEQ ID NO: 41432 - DNA, 21 bp, Homo sapiens
caggagattggaatctacttt

SEQ ID NO: 41433 - RNA, 21 nt, RNAi
ggagauuggaaucuacuuuuu

SEQ ID NO: 41434 - RNA, 21 nt, RNAi
uuccucuaaccuuagaugaaa

SEQ ID NO: 41435 - DNA, 21 bp, Homo sapiens
catttatccaccacagtgaca

SEQ ID NO: 41436 - RNA, 21 nt, RNAi
uuuauccaccacagugacauu

SEQ ID NO: 41437 - RNA, 21 nt, RNAi
uuaaauagguggugucacugu

SEQ ID NO: 41438 - DNA, 21 bp, Homo sapiens
catattactctgagtaactgg

SEQ ID NO: 41439 - RNA, 21 nt, RNAi
uauuacucugaguaacugguu

SEQ ID NO: 41440 - RNA, 21 nt, RNAi
uuauaaugagacucauugacc

SEQ ID NO: 41441 - DNA, 21 bp, Homo sapiens
cagccattcatcggatccttc

SEQ ID NO: 41442 - RNA, 21 nt, RNAi
gccauucaucggauccuucuu

SEQ ID NO: 41443 - RNA, 21 nt, RNAi
uucgguaaguagccuaggaag

SEQ ID NO: 41444 - DNA, 21 bp, Homo sapiens
cattcatcggatccttcattg

SEQ ID NO: 41445 - RNA, 21 nt, RNAi
uucaucggauccuucauuguu

SEQ ID NO: 41446 - RNA, 21 nt, RNAi
uuaaguagccuaggaaguaac

SEQ ID NO: 41447 - DNA, 21 bp, Homo sapiens
cagacatgttcctgtagaaag

SEQ ID NO: 41448 - RNA, 21 nt, RNAi
gacauguuccuguagaaaguu

SEQ ID NO: 41449 - RNA, 21 nt, RNAi
uucuguacaaggacaucuuuc

SEQ ID NO: 41450 - DNA, 21 bp, Homo sapiens
catgttcctgtagaaagaatt

SEQ ID NO: 41451 - RNA, 21 nt, RNAi
uguuccuguagaaagaauuuu

SEQ ID NO: 41452 - RNA, 21 nt, RNAi
uuacaaggacaucuuucuuaa

SEQ ID NO: 41453 - DNA, 21 bp, Homo sapiens
cacctatcaagaatcaagaga

SEQ ID NO: 41454 - RNA, 21 nt, RNAi
ccuaucaagaaucaagagauu

SEQ ID NO: 41455 - RNA, 21 nt, RNAi
uuggauaguucuuaguucucu

SEQ ID NO: 41456 - DNA, 21 bp, Homo sapiens
cagcaattctaatccactttg

SEQ ID NO: 41457 - RNA, 21 nt, RNAi
gcaauucuaauccacuuuguu

SEQ ID NO: 41458 - RNA, 21 nt, RNAi
uucguuaagauuaggugaaac

SEQ ID NO: 41459 - DNA, 21 bp, Homo sapiens
catctaaagcaatagactaga

SEQ ID NO: 41460 - RNA, 21 nt, RNAi
ucuaaagcaauagacuagauu

SEQ ID NO: 41461 - RNA, 21 nt, RNAi
uuagauuucguuaucugaucu

SEQ ID NO: 41462 - DNA, 21 bp, Homo sapiens
cacaattgtggaattacagga

SEQ ID NO: 41463 - RNA, 21 nt, RNAi
caauuguggaauuacaggauu

SEQ ID NO: 41464 - RNA, 21 nt, RNAi
uuguuaacaccuuaauguccu

SEQ ID NO: 41465 - DNA, 21 bp, Homo sapiens
caattgtggaattacaggaat

SEQ ID NO: 41466 - RNA, 21 nt, RNAi
auuguggaauuacaggaauuu

SEQ ID NO: 41467 - RNA, 21 nt, RNAi
uuuaacaccuuaauguccuua

SEQ ID NO: 41468 - DNA, 21 bp, Homo sapiens
caggaattctggtgatattaa

SEQ ID NO: 41469 - RNA, 21 nt, RNAi
ggaauucuggugauauuaauu

SEQ ID NO: 41470 - RNA, 21 nt, RNAi
uuccuuaagaccacuauaauu

SEQ ID NO: 41471 - DNA, 21 bp, Homo sapiens
cagttgatgtgacagtaagtt

SEQ ID NO: 41472 - RNA, 21 nt, RNAi
guugaugugacaguaaguuuu

SEQ ID NO: 41473 - RNA, 21 nt, RNAi
uucaacuacacugucauucaa

SEQ ID NO: 41474 - DNA, 21 bp, Homo sapiens
cagatggattgaaagatgtgg

SEQ ID NO: 41475 - RNA, 21 nt, RNAi
gauggauugaaagaugugguu

SEQ ID NO: 41476 - RNA, 21 nt, RNAi
uucuaccuaacuuucuacacc

SEQ ID NO: 41477 - DNA, 21 bp, Homo sapiens
cagctgtagatcttgatcttc

SEQ ID NO: 41478 - RNA, 21 nt, RNAi
gcuguagaucuugaucuucuu

SEQ ID NO: 41479 - RNA, 21 nt, RNAi
uucgacaucuagaacuagaag

SEQ ID NO: 41480 - DNA, 21 bp, Homo sapiens
catgtacctttattgagctta

SEQ ID NO: 41481 - RNA, 21 nt, RNAi
uguaccuuuauugagcuuauu

SEQ ID NO: 41482 - RNA, 21 nt, RNAi
uuacauggaaauaacucgaau

SEQ ID NO: 41483 - DNA, 21 bp, Homo sapiens
caaattgccacgatctcacta

SEQ ID NO: 41484 - RNA, 21 nt, RNAi
aauugccacgaucucacuauu

SEQ ID NO: 41485 - RNA, 21 nt, RNAi
uuuuaacggugcuagagugau

SEQ ID NO: 41486 - DNA, 21 bp, Homo sapiens
cacgatctcactaaaggattt

SEQ ID NO: 41487 - RNA, 21 nt, RNAi
cgaucucacuaaaggauuuuu

SEQ ID NO: 41488 - RNA, 21 nt, RNAi
uugcuagagugauuuccuaaa

SEQ ID NO: 41489 - DNA, 21 bp, Homo sapiens
cactaaaggatttctatttgc

SEQ ID NO: 41490 - RNA, 21 nt, RNAi
cuaaaggauuucuauuugcuu

SEQ ID NO: 41491 - RNA, 21 nt, RNAi
uugauuuccuaaagauaaacg

SEQ ID NO: 41492 - DNA, 21 bp, Homo sapiens
gagcggaaagtgcttgcgctc

SEQ ID NO: 41493 - RNA, 21 nt, RNAi
gcggaaagugcuugcgcucuu

SEQ ID NO: 41494 - RNA, 21 nt, RNAi
uucgccuuucacgaacgcgag

SEQ ID NO: 41495 - DNA, 21 bp, Homo sapiens
gaaagtgcttgcgctccaggc

SEQ ID NO: 41496 - RNA, 21 nt, RNAi
aagugcuugcgcuccaggcuu

SEQ ID NO: 41497 - RNA, 21 nt, RNAi
uuuucacgaacgcgagguccg

SEQ ID NO: 41498 - DNA, 21 bp, Homo sapiens
gaccaaggccaagaaggacaa

SEQ ID NO: 41499 - RNA, 21 nt, RNAi
ccaaggccaagaaggacaauu

SEQ ID NO: 41500 - RNA, 21 nt, RNAi
uugguuccgguucuuccuguu

SEQ ID NO: 41501 - DNA, 21 bp, Homo sapiens
gaaatctgaaactcagcaccg

SEQ ID NO: 41502 - RNA, 21 nt, RNAi
aaucugaaacucagcaccguu

SEQ ID NO: 41503 - RNA, 21 nt, RNAi
uuuuagacuuugagucguggc

SEQ ID NO: 41504 - DNA, 21 bp, Homo sapiens
gaaactcagcaccgaggctct

SEQ ID NO: 41505 - RNA, 21 nt, RNAi
aacucagcaccgaggcucuuu

SEQ ID NO: 41506 - RNA, 21 nt, RNAi
uuuugagucguggcuccgaga

SEQ ID NO: 41507 - DNA, 21 bp, Homo sapiens
gagagtgatctaccagagcag

SEQ ID NO: 41508 - RNA, 21 nt, RNAi
gagugaucuaccagagcaguu

SEQ ID NO: 41509 - RNA, 21 nt, RNAi
uucucacuagauggucucguc

SEQ ID NO: 41510 - DNA, 21 bp, Homo sapiens
gagtgatctaccagagcagga

SEQ ID NO: 41511 - RNA, 21 nt, RNAi
gugaucuaccagagcaggauu

SEQ ID NO: 41512 - RNA, 21 nt, RNAi
uucacuagauggucucguccu

SEQ ID NO: 41513 - DNA, 21 bp, Homo sapiens
gatctaccagagcaggaagag

SEQ ID NO: 41514 - RNA, 21 nt, RNAi
ucuaccagagcaggaagaguu

SEQ ID NO: 41515 - RNA, 21 nt, RNAi
uuagauggucucguccuucuc

SEQ ID NO: 41516 - DNA, 21 bp, Homo sapiens
gagcaggaagaggagattctg

SEQ ID NO: 41517 - RNA, 21 nt, RNAi
gcaggaagaggagauucuguu

SEQ ID NO: 41518 - RNA, 21 nt, RNAi
uucguccuucuccucuaagac

SEQ ID NO: 41519 - DNA, 21 bp, Homo sapiens
gatctgatgatgatgagcaag

SEQ ID NO: 41520 - RNA, 21 nt, RNAi
ucugaugaugaugagcaaguu

SEQ ID NO: 41521 - RNA, 21 nt, RNAi
uuagacuacuacuacucguuc

SEQ ID NO: 41522 - DNA, 21 bp, Homo sapiens
gatgatgatgagcaagaagat

SEQ ID NO: 41523 - RNA, 21 nt, RNAi
ugaugaugagcaagaagauuu

SEQ ID NO: 41524 - RNA, 21 nt, RNAi
uuacuacuacucguucuucua

SEQ ID NO: 41525 - DNA, 21 bp, Homo sapiens
gatgatgagcaagaagatcct

SEQ ID NO: 41526 - RNA, 21 nt, RNAi
ugaugagcaagaagauccuuu

SEQ ID NO: 41527 - RNA, 21 nt, RNAi
uuacuacucguucuucuagga

SEQ ID NO: 41528 - DNA, 21 bp, Homo sapiens
gatgagcaagaagatcctaat

SEQ ID NO: 41529 - RNA, 21 nt, RNAi
ugagcaagaagauccuaauuu

SEQ ID NO: 41530 - RNA, 21 nt, RNAi
uuacucguucuucuaggauua

SEQ ID NO: 41531 - DNA, 21 bp, Homo sapiens
gagcaagaagatcctaatgat

SEQ ID NO: 41532 - RNA, 21 nt, RNAi
gcaagaagauccuaaugauuu

SEQ ID NO: 41533 - RNA, 21 nt, RNAi
uucguucuucuaggauuacua

SEQ ID NO: 41534 - DNA, 21 bp, Homo sapiens
gagataccatgtgatccgaaa

SEQ ID NO: 41535 - RNA, 21 nt, RNAi
gauaccaugugauccgaaauu

SEQ ID NO: 41536 - RNA, 21 nt, RNAi
uucuaugguacacuaggcuuu

SEQ ID NO: 41537 - DNA, 21 bp, Homo sapiens
gataccatgtgatccgaaagt

SEQ ID NO: 41538 - RNA, 21 nt, RNAi
uaccaugugauccgaaaguuu

SEQ ID NO: 41539 - RNA, 21 nt, RNAi
uuaugguacacuaggcuuuca

SEQ ID NO: 41540 - DNA, 21 bp, Homo sapiens
gaagaaatttgtggcaatgaa

SEQ ID NO: 41541 - RNA, 21 nt, RNAi
agaaauuuguggcaaugaauu

SEQ ID NO: 41542 - RNA, 21 nt, RNAi
uuucuuuaaacaccguuacuu

SEQ ID NO: 41543 - DNA, 21 bp, Homo sapiens
gaaatttgtggcaatgaaagt

SEQ ID NO: 41544 - RNA, 21 nt, RNAi
aauuuguggcaaugaaaguuu

SEQ ID NO: 41545 - RNA, 21 nt, RNAi
uuuuaaacaccguuacuuuca

SEQ ID NO: 41546 - DNA, 21 bp, Homo sapiens
gaacattacactgaaacagca

SEQ ID NO: 41547 - RNA, 21 nt, RNAi
acauuacacugaaacagcauu

SEQ ID NO: 41548 - RNA, 21 nt, RNAi
uuuguaaugugacuuugucgu

SEQ ID NO: 41549 - DNA, 21 bp, Homo sapiens
gaaacagcactagatgaaatc

SEQ ID NO: 41550 - RNA, 21 nt, RNAi
aacagcacuagaugaaaucuu

SEQ ID NO: 41551 - RNA, 21 nt, RNAi
uuuugucgugaucuacuuuag

SEQ ID NO: 41552 - DNA, 21 bp, Homo sapiens
gatgaaatccggttgctgaag

SEQ ID NO: 41553 - RNA, 21 nt, RNAi
ugaaauccgguugcugaaguu

SEQ ID NO: 41554 - RNA, 21 nt, RNAi
uuacuuuaggccaacgacuuc

SEQ ID NO: 41555 - DNA, 21 bp, Homo sapiens
gaaatccggttgctgaagtca

SEQ ID NO: 41556 - RNA, 21 nt, RNAi
aauccgguugcugaagucauu

SEQ ID NO: 41557 - RNA, 21 nt, RNAi
uuuuaggccaacgacuucagu

SEQ ID NO: 41558 - DNA, 21 bp, Homo sapiens
gaagtcagttcgcaattcaga

SEQ ID NO: 41559 - RNA, 21 nt, RNAi
agucaguucgcaauucagauu

SEQ ID NO: 41560 - RNA, 21 nt, RNAi
uuucagucaagcguuaagucu

SEQ ID NO: 41561 - DNA, 21 bp, Homo sapiens
gatccaaatagagaaatggtt

SEQ ID NO: 41562 - RNA, 21 nt, RNAi
uccaaauagagaaaugguuuu

SEQ ID NO: 41563 - RNA, 21 nt, RNAi
uuagguuuaucucuuuaccaa

SEQ ID NO: 41564 - DNA, 21 bp, Homo sapiens
gagaaatggttgttcaactac

SEQ ID NO: 41565 - RNA, 21 nt, RNAi
gaaaugguuguucaacuacuu

SEQ ID NO: 41566 - RNA, 21 nt, RNAi
uucuuuaccaacaaguugaug

SEQ ID NO: 41567 - DNA, 21 bp, Homo sapiens
gaaatggttgttcaactacta

SEQ ID NO: 41568 - RNA, 21 nt, RNAi
aaugguuguucaacuacuauu

SEQ ID NO: 41569 - RNA, 21 nt, RNAi
uuuuaccaacaaguugaugau

SEQ ID NO: 41570 - DNA, 21 bp, Homo sapiens
gagttaatggaacacatatct

SEQ ID NO: 41571 - RNA, 21 nt, RNAi
guuaauggaacacauaucuuu

SEQ ID NO: 41572 - RNA, 21 nt, RNAi
uucaauuaccuuguguauaga

SEQ ID NO: 41573 - DNA, 21 bp, Homo sapiens
gaacacatatctgcatggtat

SEQ ID NO: 41574 - RNA, 21 nt, RNAi
acacauaucugcaugguauuu

SEQ ID NO: 41575 - RNA, 21 nt, RNAi
uuuguguauagacguaccaua

SEQ ID NO: 41576 - DNA, 21 bp, Homo sapiens
gattatttacataccaagtgc

SEQ ID NO: 41577 - RNA, 21 nt, RNAi
uuauuuacauaccaagugcuu

SEQ ID NO: 41578 - RNA, 21 nt, RNAi
uuaauaaauguaugguucacg

SEQ ID NO: 41579 - DNA, 21 bp, Homo sapiens
gacattaaaccagagaacatc

SEQ ID NO: 41580 - RNA, 21 nt, RNAi
cauuaaaccagagaacaucuu

SEQ ID NO: 41581 - RNA, 21 nt, RNAi
uuguaauuuggucucuuguag

SEQ ID NO: 41582 - DNA, 21 bp, Homo sapiens
gagaacatcttattgtcagtg

SEQ ID NO: 41583 - RNA, 21 nt, RNAi
gaacaucuuauugucaguguu

SEQ ID NO: 41584 - RNA, 21 nt, RNAi
uucuuguagaauaacagucac

SEQ ID NO: 41585 - DNA, 21 bp, Homo sapiens
gaacatcttattgtcagtgaa

SEQ ID NO: 41586 - RNA, 21 nt, RNAi
acaucuuauugucagugaauu

SEQ ID NO: 41587 - RNA, 21 nt, RNAi
uuuguagaauaacagucacuu

SEQ ID NO: 41588 - DNA, 21 bp, Homo sapiens
gaatgagcagtacattcggag

SEQ ID NO: 41589 - RNA, 21 nt, RNAi
augagcaguacauucggaguu

SEQ ID NO: 41590 - RNA, 21 nt, RNAi
uuuacucgucauguaagccuc

SEQ ID NO: 41591 - DNA, 21 bp, Homo sapiens
gagcagtacattcggaggctg

SEQ ID NO: 41592 - RNA, 21 nt, RNAi
gcaguacauucggaggcuguu

SEQ ID NO: 41593 - RNA, 21 nt, RNAi
uucgucauguaagccuccgac

SEQ ID NO: 41594 - DNA, 21 bp, Homo sapiens
gaggctggctgcagaagcaac

SEQ ID NO: 41595 - RNA, 21 nt, RNAi
ggcuggcugcagaagcaacuu

SEQ ID NO: 41596 - RNA, 21 nt, RNAi
uuccgaccgacgucuucguug

SEQ ID NO: 41597 - DNA, 21 bp, Homo sapiens
gaagcaacagaatggcagcga

SEQ ID NO: 41598 - RNA, 21 nt, RNAi
agcaacagaauggcagcgauu

SEQ ID NO: 41599 - RNA, 21 nt, RNAi
uuucguugucuuaccgucgcu

SEQ ID NO: 41600 - DNA, 21 bp, Homo sapiens
gaatggcagcgatctggagct

SEQ ID NO: 41601 - RNA, 21 nt, RNAi
auggcagcgaucuggagcuuu

SEQ ID NO: 41602 - RNA, 21 nt, RNAi
uuuaccgucgcuagaccucga

SEQ ID NO: 41603 - DNA, 21 bp, Homo sapiens
gatctggagctcctccgcctt

SEQ ID NO: 41604 - RNA, 21 nt, RNAi
ucuggagcuccuccgccuuuu

SEQ ID NO: 41605 - RNA, 21 nt, RNAi
uuagaccucgaggaggcggaa

SEQ ID NO: 41606 - DNA, 21 bp, Homo sapiens
gatctgcagtcagtactgctc

SEQ ID NO: 41607 - RNA, 21 nt, RNAi
ucugcagucaguacugcucuu

SEQ ID NO: 41608 - RNA, 21 nt, RNAi
uuagacgucagucaugacgag

SEQ ID NO: 41609 - DNA, 21 bp, Homo sapiens
gaagaaattgaagaagaagca

SEQ ID NO: 41610 - RNA, 21 nt, RNAi
agaaauugaagaagaagcauu

SEQ ID NO: 41611 - RNA, 21 nt, RNAi
uuucuuuaacuucuucuucgu

SEQ ID NO: 41612 - DNA, 21 bp, Homo sapiens
gaaattgaagaagaagcagaa

SEQ ID NO: 41613 - RNA, 21 nt, RNAi
aauugaagaagaagcagaauu

SEQ ID NO: 41614 - RNA, 21 nt, RNAi
uuuuaacuucuucuucgucuu

SEQ ID NO: 41615 - DNA, 21 bp, Homo sapiens
gaagaagaagcagaagcgcca

SEQ ID NO: 41616 - RNA, 21 nt, RNAi
agaagaagcagaagcgccauu

SEQ ID NO: 41617 - RNA, 21 nt, RNAi
uuucuucuucgucuucgcggu

SEQ ID NO: 41618 - DNA, 21 bp, Homo sapiens
gaagaagcagaagcgccaggc

SEQ ID NO: 41619 - RNA, 21 nt, RNAi
agaagcagaagcgccaggcuu

SEQ ID NO: 41620 - RNA, 21 nt, RNAi
uuucuucgucuucgcgguccg

SEQ ID NO: 41621 - DNA, 21 bp, Homo sapiens
gaagcagaagcgccaggcaga

SEQ ID NO: 41622 - RNA, 21 nt, RNAi
agcagaagcgccaggcagauu

SEQ ID NO: 41623 - RNA, 21 nt, RNAi
uuucgucuucgcgguccgucu

SEQ ID NO: 41624 - DNA, 21 bp, Homo sapiens
gaagcgccaggcagaattact

SEQ ID NO: 41625 - RNA, 21 nt, RNAi
agcgccaggcagaauuacuuu

SEQ ID NO: 41626 - RNA, 21 nt, RNAi
uuucgcgguccgucuuaauga

SEQ ID NO: 41627 - DNA, 21 bp, Homo sapiens
gaattactagagaagcgaatg

SEQ ID NO: 41628 - RNA, 21 nt, RNAi
auuacuagagaagcgaauguu

SEQ ID NO: 41629 - RNA, 21 nt, RNAi
uuuaaugaucucuucgcuuac

SEQ ID NO: 41630 - DNA, 21 bp, Homo sapiens
gagaagcgaatgcaggaaatt

SEQ ID NO: 41631 - RNA, 21 nt, RNAi
gaagcgaaugcaggaaauuuu

SEQ ID NO: 41632 - RNA, 21 nt, RNAi
uucuucgcuuacguccuuuaa

SEQ ID NO: 41633 - DNA, 21 bp, Homo sapiens
gaagcgaatgcaggaaattga

SEQ ID NO: 41634 - RNA, 21 nt, RNAi
agcgaaugcaggaaauugauu

SEQ ID NO: 41635 - RNA, 21 nt, RNAi
uuucgcuuacguccuuuaacu

SEQ ID NO: 41636 - DNA, 21 bp, Homo sapiens
gaatgcaggaaattgaggaaa

SEQ ID NO: 41637 - RNA, 21 nt, RNAi
augcaggaaauugaggaaauu

SEQ ID NO: 41638 - RNA, 21 nt, RNAi
uuuacguccuuuaacuccuuu

SEQ ID NO: 41639 - DNA, 21 bp, Homo sapiens
gaaattgaggaaatggagaaa

SEQ ID NO: 41640 - RNA, 21 nt, RNAi
aauugaggaaauggagaaauu

SEQ ID NO: 41641 - RNA, 21 nt, RNAi
uuuuaacuccuuuaccucuuu

SEQ ID NO: 41642 - DNA, 21 bp, Homo sapiens
gaggaaatggagaaagagtcg

SEQ ID NO: 41643 - RNA, 21 nt, RNAi
ggaaauggagaaagagucguu

SEQ ID NO: 41644 - RNA, 21 nt, RNAi
uuccuuuaccucuuucucagc

SEQ ID NO: 41645 - DNA, 21 bp, Homo sapiens
gaccaaacaagcaagaagaat

SEQ ID NO: 41646 - RNA, 21 nt, RNAi
ccaaacaagcaagaagaauuu

SEQ ID NO: 41647 - RNA, 21 nt, RNAi
uugguuuguucguucuucuua

SEQ ID NO: 41648 - DNA, 21 bp, Homo sapiens
gaagaatcagagagtcctgtt

SEQ ID NO: 41649 - RNA, 21 nt, RNAi
agaaucagagaguccuguuuu

SEQ ID NO: 41650 - RNA, 21 nt, RNAi
uuucuuagucucucaggacaa

SEQ ID NO: 41651 - DNA, 21 bp, Homo sapiens
gaatcagagagtcctgttgaa

SEQ ID NO: 41652 - RNA, 21 nt, RNAi
aucagagaguccuguugaauu

SEQ ID NO: 41653 - RNA, 21 nt, RNAi
uuuagucucucaggacaacuu

SEQ ID NO: 41654 - DNA, 21 bp, Homo sapiens
gaagagtcaagtaccattggc

SEQ ID NO: 41655 - RNA, 21 nt, RNAi
agagucaaguaccauuggcuu

SEQ ID NO: 41656 - RNA, 21 nt, RNAi
uuucucaguucaugguaaccg

SEQ ID NO: 41657 - DNA, 21 bp, Homo sapiens
gagtcaagtaccattggccag

SEQ ID NO: 41658 - RNA, 21 nt, RNAi
gucaaguaccauuggccaguu

SEQ ID NO: 41659 - RNA, 21 nt, RNAi
uucaguucaugguaaccgguc

SEQ ID NO: 41660 - DNA, 21 bp, Homo sapiens
gatcaaacgcttatggaacgt

SEQ ID NO: 41661 - RNA, 21 nt, RNAi
ucaaacgcuuauggaacguuu

SEQ ID NO: 41662 - RNA, 21 nt, RNAi
uuaguuugcgaauaccuugca

SEQ ID NO: 41663 - DNA, 21 bp, Homo sapiens
gaaattaattgcaatggagtg

SEQ ID NO: 41664 - RNA, 21 nt, RNAi
aauuaauugcaauggaguguu

SEQ ID NO: 41665 - RNA, 21 nt, RNAi
uuuuaauuaacguuaccucac

SEQ ID NO: 41666 - DNA, 21 bp, Homo sapiens
gaaacattgagacataaagag

SEQ ID NO: 41667 - RNA, 21 nt, RNAi
aacauugagacauaaagaguu

SEQ ID NO: 41668 - RNA, 21 nt, RNAi
uuuuguaacucuguauuucuc

SEQ ID NO: 41669 - DNA, 21 bp, Homo sapiens
gagacataaagaggatctaca

SEQ ID NO: 41670 - RNA, 21 nt, RNAi
gacauaaagaggaucuacauu

SEQ ID NO: 41671 - RNA, 21 nt, RNAi
uucuguauuucuccuagaugu

SEQ ID NO: 41672 - DNA, 21 bp, Homo sapiens
gacataaagaggatctacata

SEQ ID NO: 41673 - RNA, 21 nt, RNAi
cauaaagaggaucuacauauu

SEQ ID NO: 41674 - RNA, 21 nt, RNAi
uuguauuucuccuagauguau

SEQ ID NO: 41675 - DNA, 21 bp, Homo sapiens
gaggatctacataatgctaat

SEQ ID NO: 41676 - RNA, 21 nt, RNAi
ggaucuacauaaugcuaauuu

SEQ ID NO: 41677 - RNA, 21 nt, RNAi
uuccuagauguauuacgauua

SEQ ID NO: 41678 - DNA, 21 bp, Homo sapiens
gatctacataatgctaatgac

SEQ ID NO: 41679 - RNA, 21 nt, RNAi
ucuacauaaugcuaaugacuu

SEQ ID NO: 41680 - RNA, 21 nt, RNAi
uuagauguauuacgauuacug

SEQ ID NO: 41681 - DNA, 21 bp, Homo sapiens
gaatcaggaatctagtttcct

SEQ ID NO: 41682 - RNA, 21 nt, RNAi
aucaggaaucuaguuuccuuu

SEQ ID NO: 41683 - RNA, 21 nt, RNAi
uuuaguccuuagaucaaagga

SEQ ID NO: 41684 - DNA, 21 bp, Homo sapiens
gaatctagtttcctaagctcc

SEQ ID NO: 41685 - RNA, 21 nt, RNAi
aucuaguuuccuaagcuccuu

SEQ ID NO: 41686 - RNA, 21 nt, RNAi
uuuagaucaaaggauucgagg

SEQ ID NO: 41687 - DNA, 21 bp, Homo sapiens
gagacagcagcacatctcaag

SEQ ID NO: 41688 - RNA, 21 nt, RNAi
gacagcagcacaucucaaguu

SEQ ID NO: 41689 - RNA, 21 nt, RNAi
uucugucgucguguagaguuc

SEQ ID NO: 41690 - DNA, 21 bp, Homo sapiens
gacagcagcacatctcaagaa

SEQ ID NO: 41691 - RNA, 21 nt, RNAi
cagcagcacaucucaagaauu

SEQ ID NO: 41692 - RNA, 21 nt, RNAi
uugucgucguguagaguucuu

SEQ ID NO: 41693 - DNA, 21 bp, Homo sapiens
gaaacagactcttgtacacct

SEQ ID NO: 41694 - RNA, 21 nt, RNAi
aacagacucuuguacaccuuu

SEQ ID NO: 41695 - RNA, 21 nt, RNAi
uuuugucugagaacaugugga

SEQ ID NO: 41696 - DNA, 21 bp, Homo sapiens
gactcttgtacacctataaca

SEQ ID NO: 41697 - RNA, 21 nt, RNAi
cucuuguacaccuauaacauu

SEQ ID NO: 41698 - RNA, 21 nt, RNAi
uugagaacauguggauauugu

SEQ ID NO: 41699 - DNA, 21 bp, Homo sapiens
gaggtgtcagacaccatggtg

SEQ ID NO: 41700 - RNA, 21 nt, RNAi
ggugucagacaccaugguguu

SEQ ID NO: 41701 - RNA, 21 nt, RNAi
uuccacagucugugguaccac

SEQ ID NO: 41702 - DNA, 21 bp, Homo sapiens
gacaccatggtgtgccagtct

SEQ ID NO: 41703 - RNA, 21 nt, RNAi
caccauggugugccagucuuu

SEQ ID NO: 41704 - RNA, 21 nt, RNAi
uugugguaccacacggucaga

SEQ ID NO: 41705 - DNA, 21 bp, Homo sapiens
gaacaacacattagccaactt

SEQ ID NO: 41706 - RNA, 21 nt, RNAi
acaacacauuagccaacuuuu

SEQ ID NO: 41707 - RNA, 21 nt, RNAi
uuuguuguguaaucgguugaa

SEQ ID NO: 41708 - DNA, 21 bp, Homo sapiens
gaagatgaacaagagcaagaa

SEQ ID NO: 41709 - RNA, 21 nt, RNAi
agaugaacaagagcaagaauu

SEQ ID NO: 41710 - RNA, 21 nt, RNAi
uuucuacuuguucucguucuu

SEQ ID NO: 41711 - DNA, 21 bp, Homo sapiens
gatgaacaagagcaagaacat

SEQ ID NO: 41712 - RNA, 21 nt, RNAi
ugaacaagagcaagaacauuu

SEQ ID NO: 41713 - RNA, 21 nt, RNAi
uuacuuguucucguucuugua

SEQ ID NO: 41714 - DNA, 21 bp, Homo sapiens
gaacaagagcaagaacataac

SEQ ID NO: 41715 - RNA, 21 nt, RNAi
acaagagcaagaacauaacuu

SEQ ID NO: 41716 - RNA, 21 nt, RNAi
uuuguucucguucuuguauug

SEQ ID NO: 41717 - DNA, 21 bp, Homo sapiens
gagcaagaacataacggacca

SEQ ID NO: 41718 - RNA, 21 nt, RNAi
gcaagaacauaacggaccauu

SEQ ID NO: 41719 - RNA, 21 nt, RNAi
uucguucuuguauugccuggu

SEQ ID NO: 41720 - DNA, 21 bp, Homo sapiens
gaacataacggaccactggac

SEQ ID NO: 41721 - RNA, 21 nt, RNAi
acauaacggaccacuggacuu

SEQ ID NO: 41722 - RNA, 21 nt, RNAi
uuuguauugccuggugaccug

SEQ ID NO: 41723 - DNA, 21 bp, Homo sapiens
gaccactggacaacaaaggaa

SEQ ID NO: 41724 - RNA, 21 nt, RNAi
ccacuggacaacaaaggaauu

SEQ ID NO: 41725 - RNA, 21 nt, RNAi
uuggugaccuguuguuuccuu

SEQ ID NO: 41726 - DNA, 21 bp, Homo sapiens
gaagattgctgaccttggaaa

SEQ ID NO: 41727 - RNA, 21 nt, RNAi
agauugcugaccuuggaaauu

SEQ ID NO: 41728 - RNA, 21 nt, RNAi
uuucuaacgacuggaaccuuu

SEQ ID NO: 41729 - DNA, 21 bp, Homo sapiens
gattgctgaccttggaaatgc

SEQ ID NO: 41730 - RNA, 21 nt, RNAi
uugcugaccuuggaaaugcuu

SEQ ID NO: 41731 - RNA, 21 nt, RNAi
uuaacgacuggaaccuuuacg

SEQ ID NO: 41732 - DNA, 21 bp, Homo sapiens
gaccttggaaatgcttgttgg

SEQ ID NO: 41733 - RNA, 21 nt, RNAi
ccuuggaaaugcuuguugguu

SEQ ID NO: 41734 - RNA, 21 nt, RNAi
uuggaaccuuuacgaacaacc

SEQ ID NO: 41735 - DNA, 21 bp, Homo sapiens
gaaatgcttgttggcacaaac

SEQ ID NO: 41736 - RNA, 21 nt, RNAi
aaugcuuguuggcacaaacuu

SEQ ID NO: 41737 - RNA, 21 nt, RNAi
uuuuacgaacaaccguguuug

SEQ ID NO: 41738 - DNA, 21 bp, Homo sapiens
gaagatattcaaacaaggcaa

SEQ ID NO: 41739 - RNA, 21 nt, RNAi
agauauucaaacaaggcaauu

SEQ ID NO: 41740 - RNA, 21 nt, RNAi
uuucuauaaguuuguuccguu

SEQ ID NO: 41741 - DNA, 21 bp, Homo sapiens
gaagttctaatcggatctggc

SEQ ID NO: 41742 - RNA, 21 nt, RNAi
aguucuaaucggaucuggcuu

SEQ ID NO: 41743 - RNA, 21 nt, RNAi
uuucaagauuagccuagaccg

SEQ ID NO: 41744 - DNA, 21 bp, Homo sapiens
gacatttggagcacggcatgc

SEQ ID NO: 41745 - RNA, 21 nt, RNAi
cauuuggagcacggcaugcuu

SEQ ID NO: 41746 - RNA, 21 nt, RNAi
uuguaaaccucgugccguacg

SEQ ID NO: 41747 - DNA, 21 bp, Homo sapiens
gagcacggcatgcatggcctt

SEQ ID NO: 41748 - RNA, 21 nt, RNAi
gcacggcaugcauggccuuuu

SEQ ID NO: 41749 - RNA, 21 nt, RNAi
uucgugccguacguaccggaa

SEQ ID NO: 41750 - DNA, 21 bp, Homo sapiens
gaactggccacaggtgactat

SEQ ID NO: 41751 - RNA, 21 nt, RNAi
acuggccacaggugacuauuu

SEQ ID NO: 41752 - RNA, 21 nt, RNAi
uuugaccgguguccacugaua

SEQ ID NO: 41753 - DNA, 21 bp, Homo sapiens
gactatttgtttgaacctcat

SEQ ID NO: 41754 - RNA, 21 nt, RNAi
cuauuuguuugaaccucauuu

SEQ ID NO: 41755 - RNA, 21 nt, RNAi
uugauaaacaaacuuggagua

SEQ ID NO: 41756 - DNA, 21 bp, Homo sapiens
gaagagtacactcgagatgaa

SEQ ID NO: 41757 - RNA, 21 nt, RNAi
agaguacacucgagaugaauu

SEQ ID NO: 41758 - RNA, 21 nt, RNAi
uuucucaugugagcucuacuu

SEQ ID NO: 41759 - DNA, 21 bp, Homo sapiens
gagtacactcgagatgaagat

SEQ ID NO: 41760 - RNA, 21 nt, RNAi
guacacucgagaugaagauuu

SEQ ID NO: 41761 - RNA, 21 nt, RNAi
uucaugugagcucuacuucua

SEQ ID NO: 41762 - DNA, 21 bp, Homo sapiens
gagatgaagatcacattgcat

SEQ ID NO: 41763 - RNA, 21 nt, RNAi
gaugaagaucacauugcauuu

SEQ ID NO: 41764 - RNA, 21 nt, RNAi
uucuacuucuaguguaacgua

SEQ ID NO: 41765 - DNA, 21 bp, Homo sapiens
gatgaagatcacattgcattg

SEQ ID NO: 41766 - RNA, 21 nt, RNAi
ugaagaucacauugcauuguu

SEQ ID NO: 41767 - RNA, 21 nt, RNAi
uuacuucuaguguaacguaac

SEQ ID NO: 41768 - DNA, 21 bp, Homo sapiens
gaagatcacattgcattgatc

SEQ ID NO: 41769 - RNA, 21 nt, RNAi
agaucacauugcauugaucuu

SEQ ID NO: 41770 - RNA, 21 nt, RNAi
uuucuaguguaacguaacuag

SEQ ID NO: 41771 - DNA, 21 bp, Homo sapiens
gatcacattgcattgatcata

SEQ ID NO: 41772 - RNA, 21 nt, RNAi
ucacauugcauugaucauauu

SEQ ID NO: 41773 - RNA, 21 nt, RNAi
uuaguguaacguaacuaguau

SEQ ID NO: 41774 - DNA, 21 bp, Homo sapiens
gaaggtgcctcgcaagctcat

SEQ ID NO: 41775 - RNA, 21 nt, RNAi
aggugccucgcaagcucauuu

SEQ ID NO: 41776 - RNA, 21 nt, RNAi
uuuccacggagcguucgagua

SEQ ID NO: 41777 - DNA, 21 bp, Homo sapiens
gacctgaaacatatcacgaag

SEQ ID NO: 41778 - RNA, 21 nt, RNAi
ccugaaacauaucacgaaguu

SEQ ID NO: 41779 - RNA, 21 nt, RNAi
uuggacuuuguauagugcuuc

SEQ ID NO: 41780 - DNA, 21 bp, Homo sapiens
gaaacatatcacgaagctgaa

SEQ ID NO: 41781 - RNA, 21 nt, RNAi
aacauaucacgaagcugaauu

SEQ ID NO: 41782 - RNA, 21 nt, RNAi
uuuuguauagugcuucgacuu

SEQ ID NO: 41783 - DNA, 21 bp, Homo sapiens
gaggttctagtggagaagtat

SEQ ID NO: 41784 - RNA, 21 nt, RNAi
gguucuaguggagaaguauuu

SEQ ID NO: 41785 - RNA, 21 nt, RNAi
uuccaagaucaccucuucaua

SEQ ID NO: 41786 - DNA, 21 bp, Homo sapiens
gagaagtatgagtggtcgcag

SEQ ID NO: 41787 - RNA, 21 nt, RNAi
gaaguaugaguggucgcaguu

SEQ ID NO: 41788 - RNA, 21 nt, RNAi
uucuucauacucaccagcguc

SEQ ID NO: 41789 - DNA, 21 bp, Homo sapiens
gaagtatgagtggtcgcagga

SEQ ID NO: 41790 - RNA, 21 nt, RNAi
aguaugaguggucgcaggauu

SEQ ID NO: 41791 - RNA, 21 nt, RNAi
uuucauacucaccagcguccu

SEQ ID NO: 41792 - DNA, 21 bp, Homo sapiens
gagtggtcgcaggaagaggca

SEQ ID NO: 41793 - RNA, 21 nt, RNAi
guggucgcaggaagaggcauu

SEQ ID NO: 41794 - RNA, 21 nt, RNAi
uucaccagcguccuucuccgu

SEQ ID NO: 41795 - DNA, 21 bp, Homo sapiens
gaagaggcagctggcttcaca

SEQ ID NO: 41796 - RNA, 21 nt, RNAi
agaggcagcuggcuucacauu

SEQ ID NO: 41797 - RNA, 21 nt, RNAi
uuucuccgucgaccgaagugu

SEQ ID NO: 41798 - DNA, 21 bp, Homo sapiens
gaggcagctggcttcacagat

SEQ ID NO: 41799 - RNA, 21 nt, RNAi
ggcagcuggcuucacagauuu

SEQ ID NO: 41800 - RNA, 21 nt, RNAi
uuccgucgaccgaagugucua

SEQ ID NO: 41801 - DNA, 21 bp, Homo sapiens
gaagctcttccttcaagagtt

SEQ ID NO: 41802 - RNA, 21 nt, RNAi
agcucuuccuucaagaguuuu

SEQ ID NO: 41803 - RNA, 21 nt, RNAi
uuucgagaaggaaguucucaa

SEQ ID NO: 41804 - DNA, 21 bp, Homo sapiens
gagctatgaaggtgtatgagc

SEQ ID NO: 41805 - RNA, 21 nt, RNAi
gcuaugaagguguaugagcuu

SEQ ID NO: 41806 - RNA, 21 nt, RNAi
uucgauacuuccacauacucg

SEQ ID NO: 41807 - DNA, 21 bp, Homo sapiens
gagacattaaacttgctgtgt

SEQ ID NO: 41808 - RNA, 21 nt, RNAi
gacauuaaacuugcuguguuu

SEQ ID NO: 41809 - RNA, 21 nt, RNAi
uucuguaauuugaacgacaca

SEQ ID NO: 41810 - DNA, 21 bp, Homo sapiens
gacattaaacttgctgtgtcc

SEQ ID NO: 41811 - RNA, 21 nt, RNAi
cauuaaacuugcuguguccuu

SEQ ID NO: 41812 - RNA, 21 nt, RNAi
uuguaauuugaacgacacagg

SEQ ID NO: 41813 - DNA, 21 bp, Homo sapiens
gactgtttctgttgttctctg

SEQ ID NO: 41814 - RNA, 21 nt, RNAi
cuguuucuguuguucucuguu

SEQ ID NO: 41815 - RNA, 21 nt, RNAi
uugacaaagacaacaagagac

SEQ ID NO: 41816 - DNA, 21 bp, Homo sapiens
gatctttgaatcttcagtctg

SEQ ID NO: 41817 - RNA, 21 nt, RNAi
ucuuugaaucuucagucuguu

SEQ ID NO: 41818 - RNA, 21 nt, RNAi
uuagaaacuuagaagucagac

SEQ ID NO: 41819 - DNA, 21 bp, Homo sapiens
gagaacctcaggtgttctata

SEQ ID NO: 41820 - RNA, 21 nt, RNAi
gaaccucagguguucuauauu

SEQ ID NO: 41821 - RNA, 21 nt, RNAi
uucuuggaguccacaagauau

SEQ ID NO: 41822 - DNA, 21 bp, Homo sapiens
gaacctcaggtgttctataaa

SEQ ID NO: 41823 - RNA, 21 nt, RNAi
accucagguguucuauaaauu

SEQ ID NO: 41824 - RNA, 21 nt, RNAi
uuuggaguccacaagauauuu

SEQ ID NO: 41825 - DNA, 21 bp, Homo sapiens
gatcaggatgatggtagaacg

SEQ ID NO: 41826 - RNA, 21 nt, RNAi
ucaggaugaugguagaacguu

SEQ ID NO: 41827 - RNA, 21 nt, RNAi
uuaguccuacuaccaucuugc

SEQ ID NO: 41828 - DNA, 21 bp, Homo sapiens
gatgatggtagaacggagatc

SEQ ID NO: 41829 - RNA, 21 nt, RNAi
ugaugguagaacggagaucuu

SEQ ID NO: 41830 - RNA, 21 nt, RNAi
uuacuaccaucuugccucuag

SEQ ID NO: 41831 - DNA, 21 bp, Homo sapiens
gatggtagaacggagatctgg

SEQ ID NO: 41832 - RNA, 21 nt, RNAi
ugguagaacggagaucugguu

SEQ ID NO: 41833 - RNA, 21 nt, RNAi
uuaccaucuugccucuagacc

SEQ ID NO: 41834 - DNA, 21 bp, Homo sapiens
gatcttgagattctgattctt

SEQ ID NO: 41835 - RNA, 21 nt, RNAi
ucuugagauucugauucuuuu

SEQ ID NO: 41836 - RNA, 21 nt, RNAi
uuagaacucuaagacuaagaa

SEQ ID NO: 41837 - DNA, 21 bp, Homo sapiens
gaggctcgagtctttaatata

SEQ ID NO: 41838 - RNA, 21 nt, RNAi
ggcucgagucuuuaauauauu

SEQ ID NO: 41839 - RNA, 21 nt, RNAi
uuccgagcucagaaauuauau

SEQ ID NO: 41840 - DNA, 21 bp, Homo sapiens
gattagccattctctgctgct

SEQ ID NO: 41841 - RNA, 21 nt, RNAi
uuagccauucucugcugcuuu

SEQ ID NO: 41842 - RNA, 21 nt, RNAi
uuaaucgguaagagacgacga

SEQ ID NO: 41843 - DNA, 21 bp, Homo sapiens
gacatgattgagatgtacttg

SEQ ID NO: 41844 - RNA, 21 nt, RNAi
caugauugagauguacuuguu

SEQ ID NO: 41845 - RNA, 21 nt, RNAi
uuguacuaacucuacaugaac

SEQ ID NO: 41846 - DNA, 21 bp, Homo sapiens
gattgagatgtacttgaggct

SEQ ID NO: 41847 - RNA, 21 nt, RNAi
uugagauguacuugaggcuuu

SEQ ID NO: 41848 - RNA, 21 nt, RNAi
uuaacucuacaugaacuccga

SEQ ID NO: 41849 - DNA, 21 bp, Homo sapiens
gatgagcctctcctagacttg

SEQ ID NO: 41850 - RNA, 21 nt, RNAi
ugagccucuccuagacuuguu

SEQ ID NO: 41851 - RNA, 21 nt, RNAi
uuacucggagaggaucugaac

SEQ ID NO: 41852 - DNA, 21 bp, Homo sapiens
gagcctctcctagacttgacc

SEQ ID NO: 41853 - RNA, 21 nt, RNAi
gccucuccuagacuugaccuu

SEQ ID NO: 41854 - RNA, 21 nt, RNAi
uucggagaggaucugaacugg

SEQ ID NO: 41855 - DNA, 21 bp, Homo sapiens
gacttgacctagaatattaca

SEQ ID NO: 41856 - RNA, 21 nt, RNAi
cuugaccuagaauauuacauu

SEQ ID NO: 41857 - RNA, 21 nt, RNAi
uugaacuggaucuuauaaugu

SEQ ID NO: 41858 - DNA, 21 bp, Homo sapiens
gaatattacatattcctccag

SEQ ID NO: 41859 - RNA, 21 nt, RNAi
auauuacauauuccuccaguu

SEQ ID NO: 41860 - RNA, 21 nt, RNAi
uuuauaauguauaaggagguc

SEQ ID NO: 41861 - DNA, 21 bp, Homo sapiens
gattgcagcgttctcgaagtg

SEQ ID NO: 41862 - RNA, 21 nt, RNAi
uugcagcguucucgaaguguu

SEQ ID NO: 41863 - RNA, 21 nt, RNAi
uuaacgucgcaagagcuucac

SEQ ID NO: 41864 - DNA, 21 bp, Homo sapiens
gaagtggctgtaggactcgaa

SEQ ID NO: 41865 - RNA, 21 nt, RNAi
aguggcuguaggacucgaauu

SEQ ID NO: 41866 - RNA, 21 nt, RNAi
uuucaccgacauccugagcuu

SEQ ID NO: 41867 - DNA, 21 bp, Homo sapiens
gactcgaatttacagaaagcc

SEQ ID NO: 41868 - RNA, 21 nt, RNAi
cucgaauuuacagaaagccuu

SEQ ID NO: 41869 - RNA, 21 nt, RNAi
uugagcuuaaaugucuuucgg

SEQ ID NO: 41870 - DNA, 21 bp, Homo sapiens
gaatttacagaaagccacaga

SEQ ID NO: 41871 - RNA, 21 nt, RNAi
auuuacagaaagccacagauu

SEQ ID NO: 41872 - RNA, 21 nt, RNAi
uuuaaaugucuuucggugucu

SEQ ID NO: 41873 - DNA, 21 bp, Homo sapiens
gaaagccacagaggtgcaact

SEQ ID NO: 41874 - RNA, 21 nt, RNAi
aagccacagaggugcaacuuu

SEQ ID NO: 41875 - RNA, 21 nt, RNAi
uuuucggugucuccacguuga

SEQ ID NO: 41876 - DNA, 21 bp, Homo sapiens
gaggtgcaacttgaggctctg

SEQ ID NO: 41877 - RNA, 21 nt, RNAi
ggugcaacuugaggcucuguu

SEQ ID NO: 41878 - RNA, 21 nt, RNAi
uuccacguugaacuccgagac

SEQ ID NO: 41879 - DNA, 21 bp, Homo sapiens
gaggctctgctagcaagccac

SEQ ID NO: 41880 - RNA, 21 nt, RNAi
ggcucugcuagcaagccacuu

SEQ ID NO: 41881 - RNA, 21 nt, RNAi
uuccgagacgaucguucggug

SEQ ID NO: 41882 - DNA, 21 bp, Homo sapiens
gagattggaatctactttgtc

SEQ ID NO: 41883 - RNA, 21 nt, RNAi
gauuggaaucuacuuugucuu

SEQ ID NO: 41884 - RNA, 21 nt, RNAi
uucuaaccuuagaugaaacag

SEQ ID NO: 41885 - DNA, 21 bp, Homo sapiens
gattggaatctactttgtcat

SEQ ID NO: 41886 - RNA, 21 nt, RNAi
uuggaaucuacuuugucauuu

SEQ ID NO: 41887 - RNA, 21 nt, RNAi
uuaaccuuagaugaaacagua

SEQ ID NO: 41888 - DNA, 21 bp, Homo sapiens
gagtaactggccagccattca

SEQ ID NO: 41889 - RNA, 21 nt, RNAi
guaacuggccagccauucauu

SEQ ID NO: 41890 - RNA, 21 nt, RNAi
uucauugaccggucgguaagu

SEQ ID NO: 41891 - DNA, 21 bp, Homo sapiens
gaaatcagacatgttcctgta

SEQ ID NO: 41892 - RNA, 21 nt, RNAi
aaucagacauguuccuguauu

SEQ ID NO: 41893 - RNA, 21 nt, RNAi
uuuuagucuguacaaggacau

SEQ ID NO: 41894 - DNA, 21 bp, Homo sapiens
gacatgttcctgtagaaagaa

SEQ ID NO: 41895 - RNA, 21 nt, RNAi
cauguuccuguagaaagaauu

SEQ ID NO: 41896 - RNA, 21 nt, RNAi
uuguacaaggacaucuuucuu

SEQ ID NO: 41897 - DNA, 21 bp, Homo sapiens
gattgtatcaaacaacggcag

SEQ ID NO: 41898 - RNA, 21 nt, RNAi
uuguaucaaacaacggcaguu

SEQ ID NO: 41899 - RNA, 21 nt, RNAi
uuaacauaguuuguugccguc

SEQ ID NO: 41900 - DNA, 21 bp, Homo sapiens
gaaatccttcagcaattctaa

SEQ ID NO: 41901 - RNA, 21 nt, RNAi
aauccuucagcaauucuaauu

SEQ ID NO: 41902 - RNA, 21 nt, RNAi
uuuuaggaagucguuaagauu

SEQ ID NO: 41903 - DNA, 21 bp, Homo sapiens
gactagaactgaattatcttc

SEQ ID NO: 41904 - RNA, 21 nt, RNAi
cuagaacugaauuaucuucuu

SEQ ID NO: 41905 - RNA, 21 nt, RNAi
uugaucuugacuuaauagaag

SEQ ID NO: 41906 - DNA, 21 bp, Homo sapiens
gaattacaggaattctggtga

SEQ ID NO: 41907 - RNA, 21 nt, RNAi
auuacaggaauucuggugauu

SEQ ID NO: 41908 - RNA, 21 nt, RNAi
uuuaauguccuuaagaccacu

SEQ ID NO: 41909 - DNA, 21 bp, Homo sapiens
gaattctggtgatattaaggt

SEQ ID NO: 41910 - RNA, 21 nt, RNAi
auucuggugauauuaagguuu

SEQ ID NO: 41911 - RNA, 21 nt, RNAi
uuuaagaccacuauaauucca

SEQ ID NO: 41912 - DNA, 21 bp, Homo sapiens
gaaatgcttctccaccaaata

SEQ ID NO: 41913 - RNA, 21 nt, RNAi
aaugcuucuccaccaaauauu

SEQ ID NO: 41914 - RNA, 21 nt, RNAi
uuuuacgaagaggugguuuau

SEQ ID NO: 41915 - DNA, 21 bp, Homo sapiens
gagccagatggattgaaagat

SEQ ID NO: 41916 - RNA, 21 nt, RNAi
gccagauggauugaaagauuu

SEQ ID NO: 41917 - RNA, 21 nt, RNAi
uucggucuaccuaacuuucua

SEQ ID NO: 41918 - DNA, 21 bp, Homo sapiens
gatggattgaaagatgtggaa

SEQ ID NO: 41919 - RNA, 21 nt, RNAi
uggauugaaagauguggaauu

SEQ ID NO: 41920 - RNA, 21 nt, RNAi
uuaccuaacuuucuacaccuu

SEQ ID NO: 41921 - DNA, 21 bp, Homo sapiens
gattgaaagatgtggaaatag

SEQ ID NO: 41922 - RNA, 21 nt, RNAi
uugaaagauguggaaauaguu

SEQ ID NO: 41923 - RNA, 21 nt, RNAi
uuaacuuucuacaccuuuauc

SEQ ID NO: 41924 - DNA, 21 bp, Homo sapiens
gaaagatgtggaaataggcag

SEQ ID NO: 41925 - RNA, 21 nt, RNAi
aagauguggaaauaggcaguu

SEQ ID NO: 41926 - RNA, 21 nt, RNAi
uuuucuacaccuuuauccguc

SEQ ID NO: 41927 - DNA, 21 bp, Homo sapiens
gatgtggaaataggcagctgt

SEQ ID NO: 41928 - RNA, 21 nt, RNAi
uguggaaauaggcagcuguuu

SEQ ID NO: 41929 - RNA, 21 nt, RNAi
uuacaccuuuauccgucgaca

SEQ ID NO: 41930 - DNA, 21 bp, Homo sapiens
gaaataggcagctgtagatct

SEQ ID NO: 41931 - RNA, 21 nt, RNAi
aauaggcagcuguagaucuuu

SEQ ID NO: 41932 - RNA, 21 nt, RNAi
uuuuauccgucgacaucuaga

SEQ ID NO: 41933 - DNA, 21 bp, Homo sapiens
gatcttgatcttccaggtacc

SEQ ID NO: 41934 - RNA, 21 nt, RNAi
ucuugaucuuccagguaccuu

SEQ ID NO: 41935 - RNA, 21 nt, RNAi
uuagaacuagaagguccaugg

SEQ ID NO: 41936 - DNA, 21 bp, Homo sapiens
gatctcactaaaggatttcta

SEQ ID NO: 41937 - RNA, 21 nt, RNAi
ucucacuaaaggauuucuauu

SEQ ID NO: 41938 - RNA, 21 nt, RNAi
uuagagugauuuccuaaagau

SEQ ID NO: 41939 - DNA, 21 bp, Homo sapiens
gatttctatttgctgtcagtt

SEQ ID NO: 41940 - RNA, 21 nt, RNAi
uuucuauuugcugucaguuuu

SEQ ID NO: 41941 - RNA, 21 nt, RNAi
uuaaagauaaacgacagucaa

SEQ ID NO: 41942 - DNA, 21 bp, Homo sapiens
taccagagcaggaagaggaga

SEQ ID NO: 41943 - RNA, 21 nt, RNAi
ccagagcaggaagaggagauu

SEQ ID NO: 41944 - RNA, 21 nt, RNAi
uuggucucguccuucuccucu

SEQ ID NO: 41945 - DNA, 21 bp, Homo sapiens
taaaggaggttatcatcttgt

SEQ ID NO: 41946 - RNA, 21 nt, RNAi
aaggagguuaucaucuuguuu

SEQ ID NO: 41947 - RNA, 21 nt, RNAi
uuuuccuccaauaguagaaca

SEQ ID NO: 41948 - DNA, 21 bp, Homo sapiens
taccatgtgatccgaaagtta

SEQ ID NO: 41949 - RNA, 21 nt, RNAi
ccaugugauccgaaaguuauu

SEQ ID NO: 41950 - RNA, 21 nt, RNAi
uugguacacuaggcuuucaau

SEQ ID NO: 41951 - DNA, 21 bp, Homo sapiens
tacactgaaacagcactagat

SEQ ID NO: 41952 - RNA, 21 nt, RNAi
cacugaaacagcacuagauuu

SEQ ID NO: 41953 - RNA, 21 nt, RNAi
uugugacuuugucgugaucua

SEQ ID NO: 41954 - DNA, 21 bp, Homo sapiens
tagatgaaatccggttgctga

SEQ ID NO: 41955 - RNA, 21 nt, RNAi
gaugaaauccgguugcugauu

SEQ ID NO: 41956 - RNA, 21 nt, RNAi
uucuacuuuaggccaacgacu

SEQ ID NO: 41957 - DNA, 21 bp, Homo sapiens
tagagaaatggttgttcaact

SEQ ID NO: 41958 - RNA, 21 nt, RNAi
gagaaaugguuguucaacuuu

SEQ ID NO: 41959 - RNA, 21 nt, RNAi
uucucuuuaccaacaaguuga

SEQ ID NO: 41960 - DNA, 21 bp, Homo sapiens
tatcaggagttaatggaacac

SEQ ID NO: 41961 - RNA, 21 nt, RNAi
ucaggaguuaauggaacacuu

SEQ ID NO: 41962 - RNA, 21 nt, RNAi
uuaguccucaauuaccuugug

SEQ ID NO: 41963 - DNA, 21 bp, Homo sapiens
taatggaacacatatctgcat

SEQ ID NO: 41964 - RNA, 21 nt, RNAi
auggaacacauaucugcauuu

SEQ ID NO: 41965 - RNA, 21 nt, RNAi
uuuaccuuguguauagacgua

SEQ ID NO: 41966 - DNA, 21 bp, Homo sapiens
tatctgcatggtatttgaagt

SEQ ID NO: 41967 - RNA, 21 nt, RNAi
ucugcaugguauuugaaguuu

SEQ ID NO: 41968 - RNA, 21 nt, RNAi
uuagacguaccauaaacuuca

SEQ ID NO: 41969 - DNA, 21 bp, Homo sapiens
tatttacataccaagtgccgt

SEQ ID NO: 41970 - RNA, 21 nt, RNAi
uuuacauaccaagugccguuu

SEQ ID NO: 41971 - RNA, 21 nt, RNAi
uuaaauguaugguucacggca

SEQ ID NO: 41972 - DNA, 21 bp, Homo sapiens
tacataccaagtgccgtatca

SEQ ID NO: 41973 - RNA, 21 nt, RNAi
cauaccaagugccguaucauu

SEQ ID NO: 41974 - RNA, 21 nt, RNAi
uuguaugguucacggcauagu

SEQ ID NO: 41975 - DNA, 21 bp, Homo sapiens
taccaagtgccgtatcatcca

SEQ ID NO: 41976 - RNA, 21 nt, RNAi
ccaagugccguaucauccauu

SEQ ID NO: 41977 - RNA, 21 nt, RNAi
uugguucacggcauaguaggu

SEQ ID NO: 41978 - DNA, 21 bp, Homo sapiens
tatcatccacactgacattaa

SEQ ID NO: 41979 - RNA, 21 nt, RNAi
ucauccacacugacauuaauu

SEQ ID NO: 41980 - RNA, 21 nt, RNAi
uuaguaggugugacuguaauu

SEQ ID NO: 41981 - DNA, 21 bp, Homo sapiens
tattgtcagtgaatgagcagt

SEQ ID NO: 41982 - RNA, 21 nt, RNAi
uugucagugaaugagcaguuu

SEQ ID NO: 41983 - RNA, 21 nt, RNAi
uuaacagucacuuacucguca

SEQ ID NO: 41984 - DNA, 21 bp, Homo sapiens
tacattcggaggctggctgca

SEQ ID NO: 41985 - RNA, 21 nt, RNAi
cauucggaggcuggcugcauu

SEQ ID NO: 41986 - RNA, 21 nt, RNAi
uuguaagccuccgaccgacgu

SEQ ID NO: 41987 - DNA, 21 bp, Homo sapiens
tactagagaagcgaatgcagg

SEQ ID NO: 41988 - RNA, 21 nt, RNAi
cuagagaagcgaaugcagguu

SEQ ID NO: 41989 - RNA, 21 nt, RNAi
uugaucucuucgcuuacgucc

SEQ ID NO: 41990 - DNA, 21 bp, Homo sapiens
tagagaagcgaatgcaggaaa

SEQ ID NO: 41991 - RNA, 21 nt, RNAi
gagaagcgaaugcaggaaauu

SEQ ID NO: 41992 - RNA, 21 nt, RNAi
uucucuucgcuuacguccuuu

SEQ ID NO: 41993 - DNA, 21 bp, Homo sapiens
taccattggccaggatcaaac

SEQ ID NO: 41994 - RNA, 21 nt, RNAi
ccauuggccaggaucaaacuu

SEQ ID NO: 41995 - RNA, 21 nt, RNAi
uugguaaccgguccuaguuug

SEQ ID NO: 41996 - DNA, 21 bp, Homo sapiens
taattgcaatggagtgattga

SEQ ID NO: 41997 - RNA, 21 nt, RNAi
auugcaauggagugauugauu

SEQ ID NO: 41998 - RNA, 21 nt, RNAi
uuuaacguuaccucacuaacu

SEQ ID NO: 41999 - DNA, 21 bp, Homo sapiens
taaagaggatctacataatgc

SEQ ID NO: 42000 - RNA, 21 nt, RNAi
aagaggaucuacauaaugcuu

SEQ ID NO: 42001 - RNA, 21 nt, RNAi
uuuucuccuagauguauuacg

SEQ ID NO: 42002 - DNA, 21 bp, Homo sapiens
tacataatgctaatgactgtg

SEQ ID NO: 42003 - RNA, 21 nt, RNAi
cauaaugcuaaugacuguguu

SEQ ID NO: 42004 - RNA, 21 nt, RNAi
uuguauuacgauuacugacac

SEQ ID NO: 42005 - DNA, 21 bp, Homo sapiens
taatgctaatgactgtgatgt

SEQ ID NO: 42006 - RNA, 21 nt, RNAi
augcuaaugacugugauguuu

SEQ ID NO: 42007 - RNA, 21 nt, RNAi
uuuacgauuacugacacuaca

SEQ ID NO: 42008 - DNA, 21 bp, Homo sapiens
tacacctataacatctgaggt

SEQ ID NO: 42009 - RNA, 21 nt, RNAi
caccuauaacaucugagguuu

SEQ ID NO: 42010 - RNA, 21 nt, RNAi
uuguggauauuguagacucca

SEQ ID NO: 42011 - DNA, 21 bp, Homo sapiens
tataacatctgaggtgtcaga

SEQ ID NO: 42012 - RNA, 21 nt, RNAi
uaacaucugaggugucagauu

SEQ ID NO: 42013 - RNA, 21 nt, RNAi
uuauuguagacuccacagucu

SEQ ID NO: 42014 - DNA, 21 bp, Homo sapiens
taacatctgaggtgtcagaca

SEQ ID NO: 42015 - RNA, 21 nt, RNAi
acaucugaggugucagacauu

SEQ ID NO: 42016 - RNA, 21 nt, RNAi
uuuguagacuccacagucugu

SEQ ID NO: 42017 - DNA, 21 bp, Homo sapiens
taggtcagtcattcagtgaac

SEQ ID NO: 42018 - RNA, 21 nt, RNAi
ggucagucauucagugaacuu

SEQ ID NO: 42019 - RNA, 21 nt, RNAi
uuccagucaguaagucacuug

SEQ ID NO: 42020 - DNA, 21 bp, Homo sapiens
tagccaacttcaagaaagcat

SEQ ID NO: 42021 - RNA, 21 nt, RNAi
gccaacuucaagaaagcauuu

SEQ ID NO: 42022 - RNA, 21 nt, RNAi
uucgguugaaguucuuucgua

SEQ ID NO: 42023 - DNA, 21 bp, Homo sapiens
taacggaccactggacaacaa

SEQ ID NO: 42024 - RNA, 21 nt, RNAi
acggaccacuggacaacaauu

SEQ ID NO: 42025 - RNA, 21 nt, RNAi
uuugccuggugaccuguuguu

SEQ ID NO: 42026 - DNA, 21 bp, Homo sapiens
tattcaaacaaggcaatatcg

SEQ ID NO: 42027 - RNA, 21 nt, RNAi
uucaaacaaggcaauaucguu

SEQ ID NO: 42028 - RNA, 21 nt, RNAi
uuaaguuuguuccguuauagc

SEQ ID NO: 42029 - DNA, 21 bp, Homo sapiens
tatcgttccttggaagttcta

SEQ ID NO: 42030 - RNA, 21 nt, RNAi
ucguuccuuggaaguucuauu

SEQ ID NO: 42031 - RNA, 21 nt, RNAi
uuagcaaggaaccuucaagau

SEQ ID NO: 42032 - DNA, 21 bp, Homo sapiens
taatcggatctggctataata

SEQ ID NO: 42033 - RNA, 21 nt, RNAi
aucggaucuggcuauaauauu

SEQ ID NO: 42034 - RNA, 21 nt, RNAi
uuuagccuagaccgauauuau

SEQ ID NO: 42035 - DNA, 21 bp, Homo sapiens
tacactcgagatgaagatcac

SEQ ID NO: 42036 - RNA, 21 nt, RNAi
cacucgagaugaagaucacuu

SEQ ID NO: 42037 - RNA, 21 nt, RNAi
uugugagcucuacuucuagug

SEQ ID NO: 42038 - DNA, 21 bp, Homo sapiens
tatcacgaagctgaaaccttg

SEQ ID NO: 42039 - RNA, 21 nt, RNAi
ucacgaagcugaaaccuuguu

SEQ ID NO: 42040 - RNA, 21 nt, RNAi
uuagugcuucgacuuuggaac

SEQ ID NO: 42041 - DNA, 21 bp, Homo sapiens
tagtggagaagtatgagtggt

SEQ ID NO: 42042 - RNA, 21 nt, RNAi
guggagaaguaugagugguuu

SEQ ID NO: 42043 - RNA, 21 nt, RNAi
uucaccucuucauacucacca

SEQ ID NO: 42044 - DNA, 21 bp, Homo sapiens
tatgagtggtcgcaggaagag

SEQ ID NO: 42045 - RNA, 21 nt, RNAi
ugaguggucgcaggaagaguu

SEQ ID NO: 42046 - RNA, 21 nt, RNAi
uuacucaccagcguccuucuc

SEQ ID NO: 42047 - DNA, 21 bp, Homo sapiens
taatccaacatgttcatttgg

SEQ ID NO: 42048 - RNA, 21 nt, RNAi
auccaacauguucauuugguu

SEQ ID NO: 42049 - RNA, 21 nt, RNAi
uuuagguuguacaaguaaacc

SEQ ID NO: 42050 - DNA, 21 bp, Homo sapiens
taggtgaatttggccttggtt

SEQ ID NO: 42051 - RNA, 21 nt, RNAi
ggugaauuuggccuugguuuu

SEQ ID NO: 42052 - RNA, 21 nt, RNAi
uuccacuuaaaccggaaccaa

SEQ ID NO: 42053 - DNA, 21 bp, Homo sapiens
tattcattgactctaagagtc

SEQ ID NO: 42054 - RNA, 21 nt, RNAi
uucauugacucuaagagucuu

SEQ ID NO: 42055 - RNA, 21 nt, RNAi
uuaaguaacugagauucucag

SEQ ID NO: 42056 - DNA, 21 bp, Homo sapiens
tagtgcatatcctattgccag

SEQ ID NO: 42057 - RNA, 21 nt, RNAi
gugcauauccuauugccaguu

SEQ ID NO: 42058 - RNA, 21 nt, RNAi
uucacguauaggauaacgguc

SEQ ID NO: 42059 - DNA, 21 bp, Homo sapiens
tatcctattgccagcataagg

SEQ ID NO: 42060 - RNA, 21 nt, RNAi
uccuauugccagcauaagguu

SEQ ID NO: 42061 - RNA, 21 nt, RNAi
uuaggauaacggucguauucc

SEQ ID NO: 42062 - DNA, 21 bp, Homo sapiens
tattgccagcataaggatgag

SEQ ID NO: 42063 - RNA, 21 nt, RNAi
uugccagcauaaggaugaguu

SEQ ID NO: 42064 - RNA, 21 nt, RNAi
uuaacggucguauuccuacuc

SEQ ID NO: 42065 - DNA, 21 bp, Homo sapiens
taattctatgtacagcagaga

SEQ ID NO: 42066 - RNA, 21 nt, RNAi
auucuauguacagcagagauu

SEQ ID NO: 42067 - RNA, 21 nt, RNAi
uuuaagauacaugucgucucu

SEQ ID NO: 42068 - DNA, 21 bp, Homo sapiens
tatgtacagcagagacattaa

SEQ ID NO: 42069 - RNA, 21 nt, RNAi
uguacagcagagacauuaauu

SEQ ID NO: 42070 - RNA, 21 nt, RNAi
uuacaugucgucucuguaauu

SEQ ID NO: 42071 - DNA, 21 bp, Homo sapiens
tacagcagagacattaaactt

SEQ ID NO: 42072 - RNA, 21 nt, RNAi
cagcagagacauuaaacuuuu

SEQ ID NO: 42073 - RNA, 21 nt, RNAi
uugucgucucuguaauuugaa

SEQ ID NO: 42074 - DNA, 21 bp, Homo sapiens
tatcactgttcaaagcactgt

SEQ ID NO: 42075 - RNA, 21 nt, RNAi
ucacuguucaaagcacuguuu

SEQ ID NO: 42076 - RNA, 21 nt, RNAi
uuagugacaaguuucgugaca

SEQ ID NO: 42077 - DNA, 21 bp, Homo sapiens
tagtaatttcttgagaacctc

SEQ ID NO: 42078 - RNA, 21 nt, RNAi
guaauuucuugagaaccucuu

SEQ ID NO: 42079 - RNA, 21 nt, RNAi
uucauuaaagaacucuuggag

SEQ ID NO: 42080 - DNA, 21 bp, Homo sapiens
taatttcttgagaacctcagg

SEQ ID NO: 42081 - RNA, 21 nt, RNAi
auuucuugagaaccucagguu

SEQ ID NO: 42082 - RNA, 21 nt, RNAi
uuuaaagaacucuuggagucc

SEQ ID NO: 42083 - DNA, 21 bp, Homo sapiens
tataaacagtcctttcctgta

SEQ ID NO: 42084 - RNA, 21 nt, RNAi
uaaacaguccuuuccuguauu

SEQ ID NO: 42085 - RNA, 21 nt, RNAi
uuauuugucaggaaaggacau

SEQ ID NO: 42086 - DNA, 21 bp, Homo sapiens
taaacagtcctttcctgtatg

SEQ ID NO: 42087 - RNA, 21 nt, RNAi
aacaguccuuuccuguauguu

SEQ ID NO: 42088 - RNA, 21 nt, RNAi
uuuugucaggaaaggacauac

SEQ ID NO: 42089 - DNA, 21 bp, Homo sapiens
tatccatggctggcactttac

SEQ ID NO: 42090 - RNA, 21 nt, RNAi
uccauggcuggcacuuuacuu

SEQ ID NO: 42091 - RNA, 21 nt, RNAi
uuagguaccgaccgugaaaug

SEQ ID NO: 42092 - DNA, 21 bp, Homo sapiens
tactcattgcacttgagttta

SEQ ID NO: 42093 - RNA, 21 nt, RNAi
cucauugcacuugaguuuauu

SEQ ID NO: 42094 - RNA, 21 nt, RNAi
uugaguaacgugaacucaaau

SEQ ID NO: 42095 - DNA, 21 bp, Homo sapiens
taactaaaggatcaggatgat

SEQ ID NO: 42096 - RNA, 21 nt, RNAi
acuaaaggaucaggaugauuu

SEQ ID NO: 42097 - RNA, 21 nt, RNAi
uuugauuuccuaguccuacua

SEQ ID NO: 42098 - DNA, 21 bp, Homo sapiens
taaaggatcaggatgatggta

SEQ ID NO: 42099 - RNA, 21 nt, RNAi
aaggaucaggaugaugguauu

SEQ ID NO: 42100 - RNA, 21 nt, RNAi
uuuuccuaguccuacuaccau

SEQ ID NO: 42101 - DNA, 21 bp, Homo sapiens
tagatcttgagattctgattc

SEQ ID NO: 42102 - RNA, 21 nt, RNAi
gaucuugagauucugauucuu

SEQ ID NO: 42103 - RNA, 21 nt, RNAi
uucuagaacucuaagacuaag

SEQ ID NO: 42104 - DNA, 21 bp, Homo sapiens
tatggctttgcctttctgatt

SEQ ID NO: 42105 - RNA, 21 nt, RNAi
uggcuuugccuuucugauuuu

SEQ ID NO: 42106 - RNA, 21 nt, RNAi
uuaccgaaacggaaagacuaa

SEQ ID NO: 42107 - DNA, 21 bp, Homo sapiens
taagattagccattctctgct

SEQ ID NO: 42108 - RNA, 21 nt, RNAi
agauuagccauucucugcuuu

SEQ ID NO: 42109 - RNA, 21 nt, RNAi
uuucuaaucgguaagagacga

SEQ ID NO: 42110 - DNA, 21 bp, Homo sapiens
tagccattctctgctgctatt

SEQ ID NO: 42111 - RNA, 21 nt, RNAi
gccauucucugcugcuauuuu

SEQ ID NO: 42112 - RNA, 21 nt, RNAi
uucgguaagagacgacgauaa

SEQ ID NO: 42113 - DNA, 21 bp, Homo sapiens
taggatgagcctctcctagac

SEQ ID NO: 42114 - RNA, 21 nt, RNAi
ggaugagccucuccuagacuu

SEQ ID NO: 42115 - RNA, 21 nt, RNAi
uuccuacucggagaggaucug

SEQ ID NO: 42116 - DNA, 21 bp, Homo sapiens
tacatattcctccagtaagta

SEQ ID NO: 42117 - RNA, 21 nt, RNAi
cauauuccuccaguaaguauu

SEQ ID NO: 42118 - RNA, 21 nt, RNAi
uuguauaaggaggucauucau

SEQ ID NO: 42119 - DNA, 21 bp, Homo sapiens
tattcctccagtaagtaatac

SEQ ID NO: 42120 - RNA, 21 nt, RNAi
uuccuccaguaaguaauacuu

SEQ ID NO: 42121 - RNA, 21 nt, RNAi
uuaaggaggucauucauuaug

SEQ ID NO: 42122 - DNA, 21 bp, Homo sapiens
taggactcgaatttacagaaa

SEQ ID NO: 42123 - RNA, 21 nt, RNAi
ggacucgaauuuacagaaauu

SEQ ID NO: 42124 - RNA, 21 nt, RNAi
uuccugagcuuaaaugucuuu

SEQ ID NO: 42125 - DNA, 21 bp, Homo sapiens
tacagaaagccacagaggtgc

SEQ ID NO: 42126 - RNA, 21 nt, RNAi
cagaaagccacagaggugcuu

SEQ ID NO: 42127 - RNA, 21 nt, RNAi
uugucuuucggugucuccacg

SEQ ID NO: 42128 - DNA, 21 bp, Homo sapiens
tagcaagccaccagtgaggct

SEQ ID NO: 42129 - RNA, 21 nt, RNAi
gcaagccaccagugaggcuuu

SEQ ID NO: 42130 - RNA, 21 nt, RNAi
uucguucgguggucacuccga

SEQ ID NO: 42131 - DNA, 21 bp, Homo sapiens
taaccacctttctatacagga

SEQ ID NO: 42132 - RNA, 21 nt, RNAi
accaccuuucuauacaggauu

SEQ ID NO: 42133 - RNA, 21 nt, RNAi
uuugguggaaagauauguccu

SEQ ID NO: 42134 - DNA, 21 bp, Homo sapiens
tatacaggagattggaatcta

SEQ ID NO: 42135 - RNA, 21 nt, RNAi
uacaggagauuggaaucuauu

SEQ ID NO: 42136 - RNA, 21 nt, RNAi
uuauguccucuaaccuuagau

SEQ ID NO: 42137 - DNA, 21 bp, Homo sapiens
tacaggagattggaatctact

SEQ ID NO: 42138 - RNA, 21 nt, RNAi
caggagauuggaaucuacuuu

SEQ ID NO: 42139 - RNA, 21 nt, RNAi
uuguccucuaaccuuagauga

SEQ ID NO: 42140 - DNA, 21 bp, Homo sapiens
tactttgtcatttatccacca

SEQ ID NO: 42141 - RNA, 21 nt, RNAi
cuuugucauuuauccaccauu

SEQ ID NO: 42142 - RNA, 21 nt, RNAi
uugaaacaguaaauagguggu

SEQ ID NO: 42143 - DNA, 21 bp, Homo sapiens
tatccaccacagtgacaaagg

SEQ ID NO: 42144 - RNA, 21 nt, RNAi
uccaccacagugacaaagguu

SEQ ID NO: 42145 - RNA, 21 nt, RNAi
uuagguggugucacuguuucc

SEQ ID NO: 42146 - DNA, 21 bp, Homo sapiens
tattactctgagtaactggcc

SEQ ID NO: 42147 - RNA, 21 nt, RNAi
uuacucugaguaacuggccuu

SEQ ID NO: 42148 - RNA, 21 nt, RNAi
uuaaugagacucauugaccgg

SEQ ID NO: 42149 - DNA, 21 bp, Homo sapiens
tactctgagtaactggccagc

SEQ ID NO: 42150 - RNA, 21 nt, RNAi
cucugaguaacuggccagcuu

SEQ ID NO: 42151 - RNA, 21 nt, RNAi
uugagacucauugaccggucg

SEQ ID NO: 42152 - DNA, 21 bp, Homo sapiens
taactggccagccattcatcg

SEQ ID NO: 42153 - RNA, 21 nt, RNAi
acuggccagccauucaucguu

SEQ ID NO: 42154 - RNA, 21 nt, RNAi
uuugaccggucgguaaguagc

SEQ ID NO: 42155 - DNA, 21 bp, Homo sapiens
tactcctgaaatcagacatgt

SEQ ID NO: 42156 - RNA, 21 nt, RNAi
cuccugaaaucagacauguuu

SEQ ID NO: 42157 - RNA, 21 nt, RNAi
uugaggacuuuagucuguaca

SEQ ID NO: 42158 - DNA, 21 bp, Homo sapiens
taagttaggctttctatgcac

SEQ ID NO: 42159 - RNA, 21 nt, RNAi
aguuaggcuuucuaugcacuu

SEQ ID NO: 42160 - RNA, 21 nt, RNAi
uuucaauccgaaagauacgug

SEQ ID NO: 42161 - DNA, 21 bp, Homo sapiens
taggctttctatgcacctatc

SEQ ID NO: 42162 - RNA, 21 nt, RNAi
ggcuuucuaugcaccuaucuu

SEQ ID NO: 42163 - RNA, 21 nt, RNAi
uuccgaaagauacguggauag

SEQ ID NO: 42164 - DNA, 21 bp, Homo sapiens
tatgcacctatcaagaatcaa

SEQ ID NO: 42165 - RNA, 21 nt, RNAi
ugcaccuaucaagaaucaauu

SEQ ID NO: 42166 - RNA, 21 nt, RNAi
uuacguggauaguucuuaguu

SEQ ID NO: 42167 - DNA, 21 bp, Homo sapiens
tagattgtatcaaacaacggc

SEQ ID NO: 42168 - RNA, 21 nt, RNAi
gauuguaucaaacaacggcuu

SEQ ID NO: 42169 - RNA, 21 nt, RNAi
uucuaacauaguuuguugccg

SEQ ID NO: 42170 - DNA, 21 bp, Homo sapiens
taaagcaatagactagaactg

SEQ ID NO: 42171 - RNA, 21 nt, RNAi
aagcaauagacuagaacuguu

SEQ ID NO: 42172 - RNA, 21 nt, RNAi
uuuucguuaucugaucuugac

SEQ ID NO: 42173 - DNA, 21 bp, Homo sapiens
tacaggaattctggtgatatt

SEQ ID NO: 42174 - RNA, 21 nt, RNAi
caggaauucuggugauauuuu

SEQ ID NO: 42175 - RNA, 21 nt, RNAi
uuguccuuaagaccacuauaa

SEQ ID NO: 42176 - DNA, 21 bp, Homo sapiens
taacagttgatgtgacagtaa

SEQ ID NO: 42177 - RNA, 21 nt, RNAi
acaguugaugugacaguaauu

SEQ ID NO: 42178 - RNA, 21 nt, RNAi
uuugucaacuacacugucauu

SEQ ID NO: 42179 - DNA, 21 bp, Homo sapiens
tatttaaggagccagatggat

SEQ ID NO: 42180 - RNA, 21 nt, RNAi
uuuaaggagccagauggauuu

SEQ ID NO: 42181 - RNA, 21 nt, RNAi
uuaaauuccucggucuaccua

SEQ ID NO: 42182 - DNA, 21 bp, Homo sapiens
taaggagccagatggattgaa

SEQ ID NO: 42183 - RNA, 21 nt, RNAi
aggagccagauggauugaauu

SEQ ID NO: 42184 - RNA, 21 nt, RNAi
uuuccucggucuaccuaacuu

SEQ ID NO: 42185 - DNA, 21 bp, Homo sapiens
taggcagctgtagatcttgat

SEQ ID NO: 42186 - RNA, 21 nt, RNAi
ggcagcuguagaucuugauuu

SEQ ID NO: 42187 - RNA, 21 nt, RNAi
uuccgucgacaucuagaacua

SEQ ID NO: 42188 - DNA, 21 bp, Homo sapiens
tagatcttgatcttccaggta

SEQ ID NO: 42189 - RNA, 21 nt, RNAi
gaucuugaucuuccagguauu

SEQ ID NO: 42190 - RNA, 21 nt, RNAi
uucuagaacuagaagguccau

SEQ ID NO: 42191 - DNA, 21 bp, Homo sapiens
taatactgtcaaattgccacg

SEQ ID NO: 42192 - RNA, 21 nt, RNAi
auacugucaaauugccacguu

SEQ ID NO: 42193 - RNA, 21 nt, RNAi
uuuaugacaguuuaacggugc

SEQ ID NO: 42194 - DNA, 21 bp, Homo sapiens
tactgtcaaattgccacgatc

SEQ ID NO: 42195 - RNA, 21 nt, RNAi
cugucaaauugccacgaucuu

SEQ ID NO: 42196 - RNA, 21 nt, RNAi
uugacaguuuaacggugcuag

SEQ ID NO: 42197 - DNA, 21 bp, Homo sapiens
aaacgcttatggaacgtgata

SEQ ID NO: 42198 - RNA, 21 nt, RNAi
acgcuuauggaacgugauauu

SEQ ID NO: 42199 - RNA, 21 nt, RNAi
uuugcgaauaccuugcacuau

SEQ ID NO: 42200 - DNA, 21 bp, Homo sapiens
aacgcttatggaacgtgatac

SEQ ID NO: 42201 - RNA, 21 nt, RNAi
cgcuuauggaacgugauacuu

SEQ ID NO: 42202 - RNA, 21 nt, RNAi
uugcgaauaccuugcacuaug

SEQ ID NO: 42203 - DNA, 21 bp, Homo sapiens
aatggagtgattgaagtcatt

SEQ ID NO: 42204 - RNA, 21 nt, RNAi
uggagugauugaagucauuuu

SEQ ID NO: 42205 - RNA, 21 nt, RNAi
uuaccucacuaacuucaguaa

SEQ ID NO: 42206 - DNA, 21 bp, Homo sapiens
aaacagactcttgtacaccta

SEQ ID NO: 42207 - RNA, 21 nt, RNAi
acagacucuuguacaccuauu

SEQ ID NO: 42208 - RNA, 21 nt, RNAi
uuugucugagaacauguggau

SEQ ID NO: 42209 - DNA, 21 bp, Homo sapiens
aacagactcttgtacacctat

SEQ ID NO: 42210 - RNA, 21 nt, RNAi
cagacucuuguacaccuauuu

SEQ ID NO: 42211 - RNA, 21 nt, RNAi
uugucugagaacauguggaua

SEQ ID NO: 42212 - DNA, 21 bp, Homo sapiens
aacaacacattagccaacttc

SEQ ID NO: 42213 - RNA, 21 nt, RNAi
caacacauuagccaacuucuu

SEQ ID NO: 42214 - RNA, 21 nt, RNAi
uuguuguguaaucgguugaag

SEQ ID NO: 42215 - DNA, 21 bp, Homo sapiens
aagaacataacggaccactgg

SEQ ID NO: 42216 - RNA, 21 nt, RNAi
gaacauaacggaccacugguu

SEQ ID NO: 42217 - RNA, 21 nt, RNAi
uucuuguauugccuggugacc

SEQ ID NO: 42218 - DNA, 21 bp, Homo sapiens
aacataacggaccactggaca

SEQ ID NO: 42219 - RNA, 21 nt, RNAi
cauaacggaccacuggacauu

SEQ ID NO: 42220 - RNA, 21 nt, RNAi
uuguauugccuggugaccugu

SEQ ID NO: 42221 - DNA, 21 bp, Homo sapiens
aacggaccactggacaacaaa

SEQ ID NO: 42222 - RNA, 21 nt, RNAi
cggaccacuggacaacaaauu

SEQ ID NO: 42223 - RNA, 21 nt, RNAi
uugccuggugaccuguuguuu

SEQ ID NO: 42224 - DNA, 21 bp, Homo sapiens
aaacaaggcaatatcgttcct

SEQ ID NO: 42225 - RNA, 21 nt, RNAi
acaaggcaauaucguuccuuu

SEQ ID NO: 42226 - RNA, 21 nt, RNAi
uuuguuccguuauagcaagga

SEQ ID NO: 42227 - DNA, 21 bp, Homo sapiens
aacaaggcaatatcgttcctt

SEQ ID NO: 42228 - RNA, 21 nt, RNAi
caaggcaauaucguuccuuuu

SEQ ID NO: 42229 - RNA, 21 nt, RNAi
uuguuccguuauagcaaggaa

SEQ ID NO: 42230 - DNA, 21 bp, Homo sapiens
aaggcaatatcgttccttgga

SEQ ID NO: 42231 - RNA, 21 nt, RNAi
ggcaauaucguuccuuggauu

SEQ ID NO: 42232 - RNA, 21 nt, RNAi
uuccguuauagcaaggaaccu

SEQ ID NO: 42233 - DNA, 21 bp, Homo sapiens
aagagtacactcgagatgaag

SEQ ID NO: 42234 - RNA, 21 nt, RNAi
gaguacacucgagaugaaguu

SEQ ID NO: 42235 - RNA, 21 nt, RNAi
uucucaugugagcucuacuuc

SEQ ID NO: 42236 - DNA, 21 bp, Homo sapiens
aagtatgagtggtcgcaggaa

SEQ ID NO: 42237 - RNA, 21 nt, RNAi
guaugaguggucgcaggaauu

SEQ ID NO: 42238 - RNA, 21 nt, RNAi
uucauacucaccagcguccuu

SEQ ID NO: 42239 - DNA, 21 bp, Homo sapiens
caggatcaaacgcttatggaa

SEQ ID NO: 42240 - RNA, 21 nt, RNAi
ggaucaaacgcuuauggaauu

SEQ ID NO: 42241 - RNA, 21 nt, RNAi
uuccuaguuugcgaauaccuu

SEQ ID NO: 42242 - DNA, 21 bp, Homo sapiens
caaacgcttatggaacgtgat

SEQ ID NO: 42243 - RNA, 21 nt, RNAi
aacgcuuauggaacgugauuu

SEQ ID NO: 42244 - RNA, 21 nt, RNAi
uuuugcgaauaccuugcacua

SEQ ID NO: 42245 - DNA, 21 bp, Homo sapiens
caatggagtgattgaagtcat

SEQ ID NO: 42246 - RNA, 21 nt, RNAi
auggagugauugaagucauuu

SEQ ID NO: 42247 - RNA, 21 nt, RNAi
uuuaccucacuaacuucagua

SEQ ID NO: 42248 - DNA, 21 bp, Homo sapiens
cagactcttgtacacctataa

SEQ ID NO: 42249 - RNA, 21 nt, RNAi
gacucuuguacaccuauaauu

SEQ ID NO: 42250 - RNA, 21 nt, RNAi
uucugagaacauguggauauu

SEQ ID NO: 42251 - DNA, 21 bp, Homo sapiens
caagaacataacggaccactg

SEQ ID NO: 42252 - RNA, 21 nt, RNAi
agaacauaacggaccacuguu

SEQ ID NO: 42253 - RNA, 21 nt, RNAi
uuucuuguauugccuggugac

SEQ ID NO: 42254 - DNA, 21 bp, Homo sapiens
cataacggaccactggacaac

SEQ ID NO: 42255 - RNA, 21 nt, RNAi
uaacggaccacuggacaacuu

SEQ ID NO: 42256 - RNA, 21 nt, RNAi
uuauugccuggugaccuguug

SEQ ID NO: 42257 - DNA, 21 bp, Homo sapiens
caaacaaggcaatatcgttcc

SEQ ID NO: 42258 - RNA, 21 nt, RNAi
aacaaggcaauaucguuccuu

SEQ ID NO: 42259 - RNA, 21 nt, RNAi
uuuuguuccguuauagcaagg

SEQ ID NO: 42260 - DNA, 21 bp, Homo sapiens
caaggcaatatcgttccttgg

SEQ ID NO: 42261 - RNA, 21 nt, RNAi
aggcaauaucguuccuugguu

SEQ ID NO: 42262 - RNA, 21 nt, RNAi
uuuccguuauagcaaggaacc

SEQ ID NO: 42263 - DNA, 21 bp, Homo sapiens
catttggagcacggcatgcat

SEQ ID NO: 42264 - RNA, 21 nt, RNAi
uuuggagcacggcaugcauuu

SEQ ID NO: 42265 - RNA, 21 nt, RNAi
uuaaaccucgugccguacgua

SEQ ID NO: 42266 - DNA, 21 bp, Homo sapiens
cattgatcatagaacttctgg

SEQ ID NO: 42267 - RNA, 21 nt, RNAi
uugaucauagaacuucugguu

SEQ ID NO: 42268 - RNA, 21 nt, RNAi
uuaacuaguaucuugaagacc

SEQ ID NO: 42269 - DNA, 21 bp, Homo sapiens
catatcacgaagctgaaacct

SEQ ID NO: 42270 - RNA, 21 nt, RNAi
uaucacgaagcugaaaccuuu

SEQ ID NO: 42271 - RNA, 21 nt, RNAi
uuauagugcuucgacuuugga

SEQ ID NO: 42272 - DNA, 21 bp, Homo sapiens
gatcaaacgcttatggaacgt

SEQ ID NO: 42273 - RNA, 21 nt, RNAi
ucaaacgcuuauggaacguuu

SEQ ID NO: 42274 - RNA, 21 nt, RNAi
uuaguuugcgaauaccuugca

SEQ ID NO: 42275 - DNA, 21 bp, Homo sapiens
gagacataaagaggatctaca

SEQ ID NO: 42276 - RNA, 21 nt, RNAi
gacauaaagaggaucuacauu

SEQ ID NO: 42277 - RNA, 21 nt, RNAi
uucuguauuucuccuagaugu

SEQ ID NO: 42278 - DNA, 21 bp, Homo sapiens
gaaacagactcttgtacacct

SEQ ID NO: 42279 - RNA, 21 nt, RNAi
aacagacucuuguacaccuuu

SEQ ID NO: 42280 - RNA, 21 nt, RNAi
uuuugucugagaacaugugga

SEQ ID NO: 42281 - DNA, 21 bp, Homo sapiens
gactcttgtacacctataaca

SEQ ID NO: 42282 - RNA, 21 nt, RNAi
cucuuguacaccuauaacauu

SEQ ID NO: 42283 - RNA, 21 nt, RNAi
uugagaacauguggauauugu

SEQ ID NO: 42284 - DNA, 21 bp, Homo sapiens
gagcaagaacataacggacca

SEQ ID NO: 42285 - RNA, 21 nt, RNAi
gcaagaacauaacggaccauu

SEQ ID NO: 42286 - RNA, 21 nt, RNAi
uucguucuuguauugccuggu

SEQ ID NO: 42287 - DNA, 21 bp, Homo sapiens
gaacataacggaccactggac

SEQ ID NO: 42288 - RNA, 21 nt, RNAi
acauaacggaccacuggacuu

SEQ ID NO: 42289 - RNA, 21 nt, RNAi
uuuguauugccuggugaccug

SEQ ID NO: 42290 - DNA, 21 bp, Homo sapiens
gaccactggacaacaaaggaa

SEQ ID NO: 42291 - RNA, 21 nt, RNAi
ccacuggacaacaaaggaauu

SEQ ID NO: 42292 - RNA, 21 nt, RNAi
uuggugaccuguuguuuccuu

SEQ ID NO: 42293 - DNA, 21 bp, Homo sapiens
gaagagtacactcgagatgaa

SEQ ID NO: 42294 - RNA, 21 nt, RNAi
agaguacacucgagaugaauu

SEQ ID NO: 42295 - RNA, 21 nt, RNAi
uuucucaugugagcucuacuu

SEQ ID NO: 42296 - DNA, 21 bp, Homo sapiens
gacctgaaacatatcacgaag

SEQ ID NO: 42297 - RNA, 21 nt, RNAi
ccugaaacauaucacgaaguu

SEQ ID NO: 42298 - RNA, 21 nt, RNAi
uuggacuuuguauagugcuuc

SEQ ID NO: 42299 - DNA, 21 bp, Homo sapiens
gagaagtatgagtggtcgcag

SEQ ID NO: 42300 - RNA, 21 nt, RNAi
gaaguaugaguggucgcaguu

SEQ ID NO: 42301 - RNA, 21 nt, RNAi
uucuucauacucaccagcguc

SEQ ID NO: 42302 - DNA, 21 bp, Homo sapiens
gaagtatgagtggtcgcagga

SEQ ID NO: 42303 - RNA, 21 nt, RNAi
aguaugaguggucgcaggauu

SEQ ID NO: 42304 - RNA, 21 nt, RNAi
uuucauacucaccagcguccu

SEQ ID NO: 42305 - DNA, 21 bp, Homo sapiens
taatgctaatgactgtgatgt

SEQ ID NO: 42306 - RNA, 21 nt, RNAi
augcuaaugacugugauguuu

SEQ ID NO: 42307 - RNA, 21 nt, RNAi
uuuacgauuacugacacuaca

SEQ ID NO: 42308 - DNA, 21 bp, Homo sapiens
taacggaccactggacaacaa

SEQ ID NO: 42309 - RNA, 21 nt, RNAi
acggaccacuggacaacaauu

SEQ ID NO: 42310 - RNA, 21 nt, RNAi
uuugccuggugaccuguuguu

SEQ ID NO: 42311 - DNA, 21 bp, Homo sapiens
tatcacgaagctgaaaccttg

SEQ ID NO: 42312 - RNA, 21 nt, RNAi
ucacgaagcugaaaccuuguu

SEQ ID NO: 42313 - RNA, 21 nt, RNAi
uuagugcuucgacuuuggaac

SEQ ID NO: 42314 - DNA, 21 bp, Homo sapiens
aaactgcatttcaggacctgt

SEQ ID NO: 42315 - RNA, 21 nt, RNAi
acugcauuucaggaccuguuu

SEQ ID NO: 42316 - RNA, 21 nt, RNAi
uuugacguaaaguccuggaca

SEQ ID NO: 42317 - DNA, 21 bp, Homo sapiens
aactgcatttcaggacctgtt

SEQ ID NO: 42318 - RNA, 21 nt, RNAi
cugcauuucaggaccuguuuu

SEQ ID NO: 42319 - RNA, 21 nt, RNAi
uugacguaaaguccuggacaa

SEQ ID NO: 42320 - DNA, 21 bp, Homo sapiens
aaggctacagctccagttgga

SEQ ID NO: 42321 - RNA, 21 nt, RNAi
ggcuacagcuccaguuggauu

SEQ ID NO: 42322 - RNA, 21 nt, RNAi
uuccgaugucgaggucaaccu

SEQ ID NO: 42323 - DNA, 21 bp, Homo sapiens
aaacgtgttctcgtgactcag

SEQ ID NO: 42324 - RNA, 21 nt, RNAi
acguguucucgugacucaguu

SEQ ID NO: 42325 - RNA, 21 nt, RNAi
uuugcacaagagcacugaguc

SEQ ID NO: 42326 - DNA, 21 bp, Homo sapiens
aacgtgttctcgtgactcagc

SEQ ID NO: 42327 - RNA, 21 nt, RNAi
cguguucucgugacucagcuu

SEQ ID NO: 42328 - RNA, 21 nt, RNAi
uugcacaagagcacugagucg

SEQ ID NO: 42329 - DNA, 21 bp, Homo sapiens
aaattccttgtcagaatccat

SEQ ID NO: 42330 - RNA, 21 nt, RNAi
auuccuugucagaauccauuu

SEQ ID NO: 42331 - RNA, 21 nt, RNAi
uuuaaggaacagucuuaggua

SEQ ID NO: 42332 - DNA, 21 bp, Homo sapiens
aattccttgtcagaatccatt

SEQ ID NO: 42333 - RNA, 21 nt, RNAi
uuccuugucagaauccauuuu

SEQ ID NO: 42334 - RNA, 21 nt, RNAi
uuaaggaacagucuuagguaa

SEQ ID NO: 42335 - DNA, 21 bp, Homo sapiens
aaatagtggccaggctcagcg

SEQ ID NO: 42336 - RNA, 21 nt, RNAi
auaguggccaggcucagcguu

SEQ ID NO: 42337 - RNA, 21 nt, RNAi
uuuaucaccgguccgagucgc

SEQ ID NO: 42338 - DNA, 21 bp, Homo sapiens
aatagtggccaggctcagcgg

SEQ ID NO: 42339 - RNA, 21 nt, RNAi
uaguggccaggcucagcgguu

SEQ ID NO: 42340 - RNA, 21 nt, RNAi
uuaucaccgguccgagucgcc

SEQ ID NO: 42341 - DNA, 21 bp, Homo sapiens
aaagcttgtctccagtcacaa

SEQ ID NO: 42342 - RNA, 21 nt, RNAi
agcuugucuccagucacaauu

SEQ ID NO: 42343 - RNA, 21 nt, RNAi
uuucgaacagaggucaguguu

SEQ ID NO: 42344 - DNA, 21 bp, Homo sapiens
aagcttgtctccagtcacaag

SEQ ID NO: 42345 - RNA, 21 nt, RNAi
gcuugucuccagucacaaguu

SEQ ID NO: 42346 - RNA, 21 nt, RNAi
uucgaacagaggucaguguuc

SEQ ID NO: 42347 - DNA, 21 bp, Homo sapiens
aagccggttcagaatcagaag

SEQ ID NO: 42348 - RNA, 21 nt, RNAi
gccgguucagaaucagaaguu

SEQ ID NO: 42349 - RNA, 21 nt, RNAi
uucggccaagucuuagucuuc

SEQ ID NO: 42350 - DNA, 21 bp, Homo sapiens
aatcagaagcagaagcaattg

SEQ ID NO: 42351 - RNA, 21 nt, RNAi
ucagaagcagaagcaauuguu

SEQ ID NO: 42352 - RNA, 21 nt, RNAi
uuagucuucgucuucguuaac

SEQ ID NO: 42353 - DNA, 21 bp, Homo sapiens
aagcagaagcaattgcaggca

SEQ ID NO: 42354 - RNA, 21 nt, RNAi
gcagaagcaauugcaggcauu

SEQ ID NO: 42355 - RNA, 21 nt, RNAi
uucgucuucguuaacguccgu

SEQ ID NO: 42356 - DNA, 21 bp, Homo sapiens
aagcaattgcaggcaaccagt

SEQ ID NO: 42357 - RNA, 21 nt, RNAi
gcaauugcaggcaaccaguuu

SEQ ID NO: 42358 - RNA, 21 nt, RNAi
uucguuaacguccguugguca

SEQ ID NO: 42359 - DNA, 21 bp, Homo sapiens
aattgcaggcaaccagtgtac

SEQ ID NO: 42360 - RNA, 21 nt, RNAi
uugcaggcaaccaguguacuu

SEQ ID NO: 42361 - RNA, 21 nt, RNAi
uuaacguccguuggucacaug

SEQ ID NO: 42362 - DNA, 21 bp, Homo sapiens
aaccagtgtacctcatcctgt

SEQ ID NO: 42363 - RNA, 21 nt, RNAi
ccaguguaccucauccuguuu

SEQ ID NO: 42364 - RNA, 21 nt, RNAi
uuggucacauggaguaggaca

SEQ ID NO: 42365 - DNA, 21 bp, Homo sapiens
aaataatcctgaggaggaact

SEQ ID NO: 42366 - RNA, 21 nt, RNAi
auaauccugaggaggaacuuu

SEQ ID NO: 42367 - RNA, 21 nt, RNAi
uuuauuaggacuccuccuuga

SEQ ID NO: 42368 - DNA, 21 bp, Homo sapiens
aataatcctgaggaggaactg

SEQ ID NO: 42369 - RNA, 21 nt, RNAi
uaauccugaggaggaacuguu

SEQ ID NO: 42370 - RNA, 21 nt, RNAi
uuauuaggacuccuccuugac

SEQ ID NO: 42371 - DNA, 21 bp, Homo sapiens
aatcctgaggaggaactggca

SEQ ID NO: 42372 - RNA, 21 nt, RNAi
uccugaggaggaacuggcauu

SEQ ID NO: 42373 - RNA, 21 nt, RNAi
uuaggacuccuccuugaccgu

SEQ ID NO: 42374 - DNA, 21 bp, Homo sapiens
aagactttgaaattggtcgcc

SEQ ID NO: 42375 - RNA, 21 nt, RNAi
gacuuugaaauuggucgccuu

SEQ ID NO: 42376 - RNA, 21 nt, RNAi
uucugaaacuuuaaccagcgg

SEQ ID NO: 42377 - DNA, 21 bp, Homo sapiens
aagcaaagcaagtttattctg

SEQ ID NO: 42378 - RNA, 21 nt, RNAi
gcaaagcaaguuuauucuguu

SEQ ID NO: 42379 - RNA, 21 nt, RNAi
uucguuucguucaaauaagac

SEQ ID NO: 42380 - DNA, 21 bp, Homo sapiens
aaagcaagtttattctggctc

SEQ ID NO: 42381 - RNA, 21 nt, RNAi
agcaaguuuauucuggcucuu

SEQ ID NO: 42382 - RNA, 21 nt, RNAi
uuucguucaaauaagaccgag

SEQ ID NO: 42383 - DNA, 21 bp, Homo sapiens
aagcaagtttattctggctct

SEQ ID NO: 42384 - RNA, 21 nt, RNAi
gcaaguuuauucuggcucuuu

SEQ ID NO: 42385 - RNA, 21 nt, RNAi
uucguucaaauaagaccgaga

SEQ ID NO: 42386 - DNA, 21 bp, Homo sapiens
aagtgttatttaaagctcagc

SEQ ID NO: 42387 - RNA, 21 nt, RNAi
guguuauuuaaagcucagcuu

SEQ ID NO: 42388 - RNA, 21 nt, RNAi
uucacaauaaauuucgagucg

SEQ ID NO: 42389 - DNA, 21 bp, Homo sapiens
aaagctcagctggagaaagcc

SEQ ID NO: 42390 - RNA, 21 nt, RNAi
agcucagcuggagaaagccuu

SEQ ID NO: 42391 - RNA, 21 nt, RNAi
uuucgagucgaccucuuucgg

SEQ ID NO: 42392 - DNA, 21 bp, Homo sapiens
aagctcagctggagaaagccg

SEQ ID NO: 42393 - RNA, 21 nt, RNAi
gcucagcuggagaaagccguu

SEQ ID NO: 42394 - RNA, 21 nt, RNAi
uucgagucgaccucuuucggc

SEQ ID NO: 42395 - DNA, 21 bp, Homo sapiens
aaagccggagtggagcatcag

SEQ ID NO: 42396 - RNA, 21 nt, RNAi
agccggaguggagcaucaguu

SEQ ID NO: 42397 - RNA, 21 nt, RNAi
uuucggccucaccucguaguc

SEQ ID NO: 42398 - DNA, 21 bp, Homo sapiens
aagccggagtggagcatcagc

SEQ ID NO: 42399 - RNA, 21 nt, RNAi
gccggaguggagcaucagcuu

SEQ ID NO: 42400 - RNA, 21 nt, RNAi
uucggccucaccucguagucg

SEQ ID NO: 42401 - DNA, 21 bp, Homo sapiens
aagagaagtagaaatacagtc

SEQ ID NO: 42402 - RNA, 21 nt, RNAi
gagaaguagaaauacagucuu

SEQ ID NO: 42403 - RNA, 21 nt, RNAi
uucucuucaucuuuaugucag

SEQ ID NO: 42404 - DNA, 21 bp, Homo sapiens
aattctggaatatgcaccact

SEQ ID NO: 42405 - RNA, 21 nt, RNAi
uucuggaauaugcaccacuuu

SEQ ID NO: 42406 - RNA, 21 nt, RNAi
uuaagaccuuauacgugguga

SEQ ID NO: 42407 - DNA, 21 bp, Homo sapiens
aatatgcaccacttggaacag

SEQ ID NO: 42408 - RNA, 21 nt, RNAi
uaugcaccacuuggaacaguu

SEQ ID NO: 42409 - RNA, 21 nt, RNAi
uuauacguggugaaccuuguc

SEQ ID NO: 42410 - DNA, 21 bp, Homo sapiens
aactttcaaagtttgatgagc

SEQ ID NO: 42411 - RNA, 21 nt, RNAi
cuuucaaaguuugaugagcuu

SEQ ID NO: 42412 - RNA, 21 nt, RNAi
uugaaaguuucaaacuacucg

SEQ ID NO: 42413 - DNA, 21 bp, Homo sapiens
aaagtttgatgagcagagaac

SEQ ID NO: 42414 - RNA, 21 nt, RNAi
aguuugaugagcagagaacuu

SEQ ID NO: 42415 - RNA, 21 nt, RNAi
uuucaaacuacucgucucuug

SEQ ID NO: 42416 - DNA, 21 bp, Homo sapiens
aagtttgatgagcagagaact

SEQ ID NO: 42417 - RNA, 21 nt, RNAi
guuugaugagcagagaacuuu

SEQ ID NO: 42418 - RNA, 21 nt, RNAi
uucaaacuacucgucucuuga

SEQ ID NO: 42419 - DNA, 21 bp, Homo sapiens
aagagagttattcatagagac

SEQ ID NO: 42420 - RNA, 21 nt, RNAi
gagaguuauucauagagacuu

SEQ ID NO: 42421 - RNA, 21 nt, RNAi
uucucucaauaaguaucucug

SEQ ID NO: 42422 - DNA, 21 bp, Homo sapiens
aagccagagaacttacttctt

SEQ ID NO: 42423 - RNA, 21 nt, RNAi
gccagagaacuuacuucuuuu

SEQ ID NO: 42424 - RNA, 21 nt, RNAi
uucggucucuugaaugaagaa

SEQ ID NO: 42425 - DNA, 21 bp, Homo sapiens
aacttacttcttggatcagct

SEQ ID NO: 42426 - RNA, 21 nt, RNAi
cuuacuucuuggaucagcuuu

SEQ ID NO: 42427 - RNA, 21 nt, RNAi
uugaaugaagaaccuagucga

SEQ ID NO: 42428 - DNA, 21 bp, Homo sapiens
aaatgattgaaggtcggatgc

SEQ ID NO: 42429 - RNA, 21 nt, RNAi
augauugaaggucggaugcuu

SEQ ID NO: 42430 - RNA, 21 nt, RNAi
uuuacuaacuuccagccuacg

SEQ ID NO: 42431 - DNA, 21 bp, Homo sapiens
aatgattgaaggtcggatgca

SEQ ID NO: 42432 - RNA, 21 nt, RNAi
ugauugaaggucggaugcauu

SEQ ID NO: 42433 - RNA, 21 nt, RNAi
uuacuaacuuccagccuacgu

SEQ ID NO: 42434 - DNA, 21 bp, Homo sapiens
aaggtcggatgcatgatgaga

SEQ ID NO: 42435 - RNA, 21 nt, RNAi
ggucggaugcaugaugagauu

SEQ ID NO: 42436 - RNA, 21 nt, RNAi
uuccagccuacguacuacucu

SEQ ID NO: 42437 - DNA, 21 bp, Homo sapiens
aaggtggatctctggagcctt

SEQ ID NO: 42438 - RNA, 21 nt, RNAi
gguggaucucuggagccuuuu

SEQ ID NO: 42439 - RNA, 21 nt, RNAi
uuccaccuagagaccucggaa

SEQ ID NO: 42440 - DNA, 21 bp, Homo sapiens
aaacacataccaagagaccta

SEQ ID NO: 42441 - RNA, 21 nt, RNAi
acacauaccaagagaccuauu

SEQ ID NO: 42442 - RNA, 21 nt, RNAi
uuuguguaugguucucuggau

SEQ ID NO: 42443 - DNA, 21 bp, Homo sapiens
aacacataccaagagacctac

SEQ ID NO: 42444 - RNA, 21 nt, RNAi
cacauaccaagagaccuacuu

SEQ ID NO: 42445 - RNA, 21 nt, RNAi
uuguguaugguucucuggaug

SEQ ID NO: 42446 - DNA, 21 bp, Homo sapiens
aagactgttgaagcataatcc

SEQ ID NO: 42447 - RNA, 21 nt, RNAi
gacuguugaagcauaauccuu

SEQ ID NO: 42448 - RNA, 21 nt, RNAi
uucugacaacuucguauuagg

SEQ ID NO: 42449 - DNA, 21 bp, Homo sapiens
aatgctcagagaagtacttga

SEQ ID NO: 42450 - RNA, 21 nt, RNAi
ugcucagagaaguacuugauu

SEQ ID NO: 42451 - RNA, 21 nt, RNAi
uuacgagucucuucaugaacu

SEQ ID NO: 42452 - DNA, 21 bp, Homo sapiens
aaacaaagaatcagctagcaa

SEQ ID NO: 42453 - RNA, 21 nt, RNAi
acaaagaaucagcuagcaauu

SEQ ID NO: 42454 - RNA, 21 nt, RNAi
uuuguuucuuagucgaucguu

SEQ ID NO: 42455 - DNA, 21 bp, Homo sapiens
aacaaagaatcagctagcaaa

SEQ ID NO: 42456 - RNA, 21 nt, RNAi
caaagaaucagcuagcaaauu

SEQ ID NO: 42457 - RNA, 21 nt, RNAi
uuguuucuuagucgaucguuu

SEQ ID NO: 42458 - DNA, 21 bp, Homo sapiens
aaagaatcagctagcaaacag

SEQ ID NO: 42459 - RNA, 21 nt, RNAi
agaaucagcuagcaaacaguu

SEQ ID NO: 42460 - RNA, 21 nt, RNAi
uuucuuagucgaucguuuguc

SEQ ID NO: 42461 - DNA, 21 bp, Homo sapiens
aagaatcagctagcaaacagt

SEQ ID NO: 42462 - RNA, 21 nt, RNAi
gaaucagcuagcaaacaguuu

SEQ ID NO: 42463 - RNA, 21 nt, RNAi
uucuuagucgaucguuuguca

SEQ ID NO: 42464 - DNA, 21 bp, Homo sapiens
aatcagctagcaaacagtctt

SEQ ID NO: 42465 - RNA, 21 nt, RNAi
ucagcuagcaaacagucuuuu

SEQ ID NO: 42466 - RNA, 21 nt, RNAi
uuagucgaucguuugucagaa

SEQ ID NO: 42467 - DNA, 21 bp, Homo sapiens
aaacagtcttaggaatcgtgc

SEQ ID NO: 42468 - RNA, 21 nt, RNAi
acagucuuaggaaucgugcuu

SEQ ID NO: 42469 - RNA, 21 nt, RNAi
uuugucagaauccuuagcacg

SEQ ID NO: 42470 - DNA, 21 bp, Homo sapiens
aacagtcttaggaatcgtgca

SEQ ID NO: 42471 - RNA, 21 nt, RNAi
cagucuuaggaaucgugcauu

SEQ ID NO: 42472 - RNA, 21 nt, RNAi
uugucagaauccuuagcacgu

SEQ ID NO: 42473 - DNA, 21 bp, Homo sapiens
aacctgacaggaacatgctac

SEQ ID NO: 42474 - RNA, 21 nt, RNAi
ccugacaggaacaugcuacuu

SEQ ID NO: 42475 - RNA, 21 nt, RNAi
uuggacuguccuuguacgaug

SEQ ID NO: 42476 - DNA, 21 bp, Homo sapiens
aatctagaacgctacacaaga

SEQ ID NO: 42477 - RNA, 21 nt, RNAi
ucuagaacgcuacacaagauu

SEQ ID NO: 42478 - RNA, 21 nt, RNAi
uuagaucuugcgauguguucu

SEQ ID NO: 42479 - DNA, 21 bp, Homo sapiens
aaagctccacatcaataaaca

SEQ ID NO: 42480 - RNA, 21 nt, RNAi
agcuccacaucaauaaacauu

SEQ ID NO: 42481 - RNA, 21 nt, RNAi
uuucgagguguaguuauuugu

SEQ ID NO: 42482 - DNA, 21 bp, Homo sapiens
aagctccacatcaataaacat

SEQ ID NO: 42483 - RNA, 21 nt, RNAi
gcuccacaucaauaaacauuu

SEQ ID NO: 42484 - RNA, 21 nt, RNAi
uucgagguguaguuauuugua

SEQ ID NO: 42485 - DNA, 21 bp, Homo sapiens
aataaacatgacactctgaag

SEQ ID NO: 42486 - RNA, 21 nt, RNAi
uaaacaugacacucugaaguu

SEQ ID NO: 42487 - RNA, 21 nt, RNAi
uuauuuguacugugagacuuc

SEQ ID NO: 42488 - DNA, 21 bp, Homo sapiens
aaacatgacactctgaagtga

SEQ ID NO: 42489 - RNA, 21 nt, RNAi
acaugacacucugaagugauu

SEQ ID NO: 42490 - RNA, 21 nt, RNAi
uuuguacugugagacuucacu

SEQ ID NO: 42491 - DNA, 21 bp, Homo sapiens
aacatgacactctgaagtgaa

SEQ ID NO: 42492 - RNA, 21 nt, RNAi
caugacacucugaagugaauu

SEQ ID NO: 42493 - RNA, 21 nt, RNAi
uuguacugugagacuucacuu

SEQ ID NO: 42494 - DNA, 21 bp, Homo sapiens
aagtgaaagtagccacgagaa

SEQ ID NO: 42495 - RNA, 21 nt, RNAi
gugaaaguagccacgagaauu

SEQ ID NO: 42496 - RNA, 21 nt, RNAi
uucacuuucaucggugcucuu

SEQ ID NO: 42497 - DNA, 21 bp, Homo sapiens
aaagtagccacgagaattgtg

SEQ ID NO: 42498 - RNA, 21 nt, RNAi
aguagccacgagaauuguguu

SEQ ID NO: 42499 - RNA, 21 nt, RNAi
uuucaucggugcucuuaacac

SEQ ID NO: 42500 - DNA, 21 bp, Homo sapiens
aagtagccacgagaattgtgc

SEQ ID NO: 42501 - RNA, 21 nt, RNAi
guagccacgagaauugugcuu

SEQ ID NO: 42502 - RNA, 21 nt, RNAi
uucaucggugcucuuaacacg

SEQ ID NO: 42503 - DNA, 21 bp, Homo sapiens
aattgtgctacttatactggt

SEQ ID NO: 42504 - RNA, 21 nt, RNAi
uugugcuacuuauacugguuu

SEQ ID NO: 42505 - RNA, 21 nt, RNAi
uuaacacgaugaauaugacca

SEQ ID NO: 42506 - DNA, 21 bp, Homo sapiens
aatctggaggcaaggttcgac

SEQ ID NO: 42507 - RNA, 21 nt, RNAi
ucuggaggcaagguucgacuu

SEQ ID NO: 42508 - RNA, 21 nt, RNAi
uuagaccuccguuccaagcug

SEQ ID NO: 42509 - DNA, 21 bp, Homo sapiens
aaatccagagcctggctgtgg

SEQ ID NO: 42510 - RNA, 21 nt, RNAi
auccagagccuggcugugguu

SEQ ID NO: 42511 - RNA, 21 nt, RNAi
uuuaggucucggaccgacacc

SEQ ID NO: 42512 - DNA, 21 bp, Homo sapiens
aaggagctgtgcaataacctt

SEQ ID NO: 42513 - RNA, 21 nt, RNAi
ggagcugugcaauaaccuuuu

SEQ ID NO: 42514 - RNA, 21 nt, RNAi
uuccucgacacguuauuggaa

SEQ ID NO: 42515 - DNA, 21 bp, Homo sapiens
aataaccttcctagtacctga

SEQ ID NO: 42516 - RNA, 21 nt, RNAi
uaaccuuccuaguaccugauu

SEQ ID NO: 42517 - RNA, 21 nt, RNAi
uuauuggaaggaucauggacu

SEQ ID NO: 42518 - DNA, 21 bp, Homo sapiens
aaccttcctagtacctgagtg

SEQ ID NO: 42519 - RNA, 21 nt, RNAi
ccuuccuaguaccugaguguu

SEQ ID NO: 42520 - RNA, 21 nt, RNAi
uuggaaggaucauggacucac

SEQ ID NO: 42521 - DNA, 21 bp, Homo sapiens
aagcctggtaaagctgttgga

SEQ ID NO: 42522 - RNA, 21 nt, RNAi
gccugguaaagcuguuggauu

SEQ ID NO: 42523 - RNA, 21 nt, RNAi
uucggaccauuucgacaaccu

SEQ ID NO: 42524 - DNA, 21 bp, Homo sapiens
aaagctgttggaatgagtatg

SEQ ID NO: 42525 - RNA, 21 nt, RNAi
agcuguuggaaugaguauguu

SEQ ID NO: 42526 - RNA, 21 nt, RNAi
uuucgacaaccuuacucauac

SEQ ID NO: 42527 - DNA, 21 bp, Homo sapiens
aagctgttggaatgagtatgt

SEQ ID NO: 42528 - RNA, 21 nt, RNAi
gcuguuggaaugaguauguuu

SEQ ID NO: 42529 - RNA, 21 nt, RNAi
uucgacaaccuuacucauaca

SEQ ID NO: 42530 - DNA, 21 bp, Homo sapiens
aatgctgtgtgtctgtccggc

SEQ ID NO: 42531 - RNA, 21 nt, RNAi
ugcugugugucuguccggcuu

SEQ ID NO: 42532 - RNA, 21 nt, RNAi
uuacgacacacagacaggccg

SEQ ID NO: 42533 - DNA, 21 bp, Homo sapiens
aaataggaacacgtgctctac

SEQ ID NO: 42534 - RNA, 21 nt, RNAi
auaggaacacgugcucuacuu

SEQ ID NO: 42535 - RNA, 21 nt, RNAi
uuuauccuugugcacgagaug

SEQ ID NO: 42536 - DNA, 21 bp, Homo sapiens
aataggaacacgtgctctacc

SEQ ID NO: 42537 - RNA, 21 nt, RNAi
uaggaacacgugcucuaccuu

SEQ ID NO: 42538 - RNA, 21 nt, RNAi
uuauccuugugcacgagaugg

SEQ ID NO: 42539 - DNA, 21 bp, Homo sapiens
aacacgtgctctacctccatt

SEQ ID NO: 42540 - RNA, 21 nt, RNAi
cacgugcucuaccuccauuuu

SEQ ID NO: 42541 - RNA, 21 nt, RNAi
uugugcacgagauggagguaa

SEQ ID NO: 42542 - DNA, 21 bp, Homo sapiens
aagaggccatgtgtctcagag

SEQ ID NO: 42543 - RNA, 21 nt, RNAi
gaggccaugugucucagaguu

SEQ ID NO: 42544 - RNA, 21 nt, RNAi
uucuccgguacacagagucuc

SEQ ID NO: 42545 - DNA, 21 bp, Homo sapiens
aaacattggagtcatagcatg

SEQ ID NO: 42546 - RNA, 21 nt, RNAi
acauuggagucauagcauguu

SEQ ID NO: 42547 - RNA, 21 nt, RNAi
uuuguaaccucaguaucguac

SEQ ID NO: 42548 - DNA, 21 bp, Homo sapiens
aacattggagtcatagcatgt

SEQ ID NO: 42549 - RNA, 21 nt, RNAi
cauuggagucauagcauguuu

SEQ ID NO: 42550 - RNA, 21 nt, RNAi
uuguaaccucaguaucguaca

SEQ ID NO: 42551 - DNA, 21 bp, Homo sapiens
cagctagaggcatcatggacc

SEQ ID NO: 42552 - RNA, 21 nt, RNAi
gcuagaggcaucauggaccuu

SEQ ID NO: 42553 - RNA, 21 nt, RNAi
uucgaucuccguaguaccugg

SEQ ID NO: 42554 - DNA, 21 bp, Homo sapiens
catcatggaccgatctaaaga

SEQ ID NO: 42555 - RNA, 21 nt, RNAi
ucauggaccgaucuaaagauu

SEQ ID NO: 42556 - RNA, 21 nt, RNAi
uuaguaccuggcuagauuucu

SEQ ID NO: 42557 - DNA, 21 bp, Homo sapiens
catttcaggacctgttaaggc

SEQ ID NO: 42558 - RNA, 21 nt, RNAi
uuucaggaccuguuaaggcuu

SEQ ID NO: 42559 - RNA, 21 nt, RNAi
uuaaaguccuggacaauuccg

SEQ ID NO: 42560 - DNA, 21 bp, Homo sapiens
caggacctgttaaggctacag

SEQ ID NO: 42561 - RNA, 21 nt, RNAi
ggaccuguuaaggcuacaguu

SEQ ID NO: 42562 - RNA, 21 nt, RNAi
uuccuggacaauuccgauguc

SEQ ID NO: 42563 - DNA, 21 bp, Homo sapiens
cagctccagttggaggtccaa

SEQ ID NO: 42564 - RNA, 21 nt, RNAi
gcuccaguuggagguccaauu

SEQ ID NO: 42565 - RNA, 21 nt, RNAi
uucgaggucaaccuccagguu

SEQ ID NO: 42566 - DNA, 21 bp, Homo sapiens
cagcaaattccttgtcagaat

SEQ ID NO: 42567 - RNA, 21 nt, RNAi
gcaaauuccuugucagaauuu

SEQ ID NO: 42568 - RNA, 21 nt, RNAi
uucguuuaaggaacagucuua

SEQ ID NO: 42569 - DNA, 21 bp, Homo sapiens
caaattccttgtcagaatcca

SEQ ID NO: 42570 - RNA, 21 nt, RNAi
aauuccuugucagaauccauu

SEQ ID NO: 42571 - RNA, 21 nt, RNAi
uuuuaaggaacagucuuaggu

SEQ ID NO: 42572 - DNA, 21 bp, Homo sapiens
cagaatccattacctgtaaat

SEQ ID NO: 42573 - RNA, 21 nt, RNAi
gaauccauuaccuguaaauuu

SEQ ID NO: 42574 - RNA, 21 nt, RNAi
uucuuagguaauggacauuua

SEQ ID NO: 42575 - DNA, 21 bp, Homo sapiens
cattacctgtaaatagtggcc

SEQ ID NO: 42576 - RNA, 21 nt, RNAi
uuaccuguaaauaguggccuu

SEQ ID NO: 42577 - RNA, 21 nt, RNAi
uuaauggacauuuaucaccgg

SEQ ID NO: 42578 - DNA, 21 bp, Homo sapiens
cagcgcgttcctttgcaagca

SEQ ID NO: 42579 - RNA, 21 nt, RNAi
gcgcguuccuuugcaagcauu

SEQ ID NO: 42580 - RNA, 21 nt, RNAi
uucgcgcaaggaaacguucgu

SEQ ID NO: 42581 - DNA, 21 bp, Homo sapiens
cagtcacaagccggttcagaa

SEQ ID NO: 42582 - RNA, 21 nt, RNAi
gucacaagccgguucagaauu

SEQ ID NO: 42583 - RNA, 21 nt, RNAi
uucaguguucggccaagucuu

SEQ ID NO: 42584 - DNA, 21 bp, Homo sapiens
cacaagccggttcagaatcag

SEQ ID NO: 42585 - RNA, 21 nt, RNAi
caagccgguucagaaucaguu

SEQ ID NO: 42586 - RNA, 21 nt, RNAi
uuguucggccaagucuuaguc

SEQ ID NO: 42587 - DNA, 21 bp, Homo sapiens
caagccggttcagaatcagaa

SEQ ID NO: 42588 - RNA, 21 nt, RNAi
agccgguucagaaucagaauu

SEQ ID NO: 42589 - RNA, 21 nt, RNAi
uuucggccaagucuuagucuu

SEQ ID NO: 42590 - DNA, 21 bp, Homo sapiens
cagaatcagaagcagaagcaa

SEQ ID NO: 42591 - RNA, 21 nt, RNAi
gaaucagaagcagaagcaauu

SEQ ID NO: 42592 - RNA, 21 nt, RNAi
uucuuagucuucgucuucguu

SEQ ID NO: 42593 - DNA, 21 bp, Homo sapiens
cagaagcagaagcaattgcag

SEQ ID NO: 42594 - RNA, 21 nt, RNAi
gaagcagaagcaauugcaguu

SEQ ID NO: 42595 - RNA, 21 nt, RNAi
uucuucgucuucguuaacguc

SEQ ID NO: 42596 - DNA, 21 bp, Homo sapiens
cagaagcaattgcaggcaacc

SEQ ID NO: 42597 - RNA, 21 nt, RNAi
gaagcaauugcaggcaaccuu

SEQ ID NO: 42598 - RNA, 21 nt, RNAi
uucuucguuaacguccguugg

SEQ ID NO: 42599 - DNA, 21 bp, Homo sapiens
caattgcaggcaaccagtgta

SEQ ID NO: 42600 - RNA, 21 nt, RNAi
auugcaggcaaccaguguauu

SEQ ID NO: 42601 - RNA, 21 nt, RNAi
uuuaacguccguuggucacau

SEQ ID NO: 42602 - DNA, 21 bp, Homo sapiens
caggcaaccagtgtacctcat

SEQ ID NO: 42603 - RNA, 21 nt, RNAi
ggcaaccaguguaccucauuu

SEQ ID NO: 42604 - RNA, 21 nt, RNAi
uuccguuggucacauggagua

SEQ ID NO: 42605 - DNA, 21 bp, Homo sapiens
caaccagtgtacctcatcctg

SEQ ID NO: 42606 - RNA, 21 nt, RNAi
accaguguaccucauccuguu

SEQ ID NO: 42607 - RNA, 21 nt, RNAi
uuuggucacauggaguaggac

SEQ ID NO: 42608 - DNA, 21 bp, Homo sapiens
cagtgtacctcatcctgtctc

SEQ ID NO: 42609 - RNA, 21 nt, RNAi
guguaccucauccugucucuu

SEQ ID NO: 42610 - RNA, 21 nt, RNAi
uucacauggaguaggacagag

SEQ ID NO: 42611 - DNA, 21 bp, Homo sapiens
catcctgtctccaggccactg

SEQ ID NO: 42612 - RNA, 21 nt, RNAi
uccugucuccaggccacuguu

SEQ ID NO: 42613 - RNA, 21 nt, RNAi
uuaggacagagguccggugac

SEQ ID NO: 42614 - DNA, 21 bp, Homo sapiens
caaagcaagtttattctggct

SEQ ID NO: 42615 - RNA, 21 nt, RNAi
aagcaaguuuauucuggcuuu

SEQ ID NO: 42616 - RNA, 21 nt, RNAi
uuuucguucaaauaagaccga

SEQ ID NO: 42617 - DNA, 21 bp, Homo sapiens
caagtttattctggctcttaa

SEQ ID NO: 42618 - RNA, 21 nt, RNAi
aguuuauucuggcucuuaauu

SEQ ID NO: 42619 - RNA, 21 nt, RNAi
uuucaaauaagaccgagaauu

SEQ ID NO: 42620 - DNA, 21 bp, Homo sapiens
cagctggagaaagccggagtg

SEQ ID NO: 42621 - RNA, 21 nt, RNAi
gcuggagaaagccggaguguu

SEQ ID NO: 42622 - RNA, 21 nt, RNAi
uucgaccucuuucggccucac

SEQ ID NO: 42623 - DNA, 21 bp, Homo sapiens
catcagctcagaagagaagta

SEQ ID NO: 42624 - RNA, 21 nt, RNAi
ucagcucagaagagaaguauu

SEQ ID NO: 42625 - RNA, 21 nt, RNAi
uuagucgagucuucucuucau

SEQ ID NO: 42626 - DNA, 21 bp, Homo sapiens
cagctcagaagagaagtagaa

SEQ ID NO: 42627 - RNA, 21 nt, RNAi
gcucagaagagaaguagaauu

SEQ ID NO: 42628 - RNA, 21 nt, RNAi
uucgagucuucucuucaucuu

SEQ ID NO: 42629 - DNA, 21 bp, Homo sapiens
cagaagagaagtagaaataca

SEQ ID NO: 42630 - RNA, 21 nt, RNAi
gaagagaaguagaaauacauu

SEQ ID NO: 42631 - RNA, 21 nt, RNAi
uucuucucuucaucuuuaugu

SEQ ID NO: 42632 - DNA, 21 bp, Homo sapiens
caccttcggcatcctaatatt

SEQ ID NO: 42633 - RNA, 21 nt, RNAi
ccuucggcauccuaauauuuu

SEQ ID NO: 42634 - RNA, 21 nt, RNAi
uuggaagccguaggauuauaa

SEQ ID NO: 42635 - DNA, 21 bp, Homo sapiens
catcctaatattcttagactg

SEQ ID NO: 42636 - RNA, 21 nt, RNAi
uccuaauauucuuagacuguu

SEQ ID NO: 42637 - RNA, 21 nt, RNAi
uuaggauuauaagaaucugac

SEQ ID NO: 42638 - DNA, 21 bp, Homo sapiens
catgatgctaccagagtctac

SEQ ID NO: 42639 - RNA, 21 nt, RNAi
ugaugcuaccagagucuacuu

SEQ ID NO: 42640 - RNA, 21 nt, RNAi
uuacuacgauggucucagaug

SEQ ID NO: 42641 - DNA, 21 bp, Homo sapiens
cagagtctacctaattctgga

SEQ ID NO: 42642 - RNA, 21 nt, RNAi
gagucuaccuaauucuggauu

SEQ ID NO: 42643 - RNA, 21 nt, RNAi
uucucagauggauuaagaccu

SEQ ID NO: 42644 - DNA, 21 bp, Homo sapiens
caccacttggaacagtttata

SEQ ID NO: 42645 - RNA, 21 nt, RNAi
ccacuuggaacaguuuauauu

SEQ ID NO: 42646 - RNA, 21 nt, RNAi
uuggugaaccuugucaaauau

SEQ ID NO: 42647 - DNA, 21 bp, Homo sapiens
cacttggaacagtttatagag

SEQ ID NO: 42648 - RNA, 21 nt, RNAi
cuuggaacaguuuauagaguu

SEQ ID NO: 42649 - RNA, 21 nt, RNAi
uugaaccuugucaaauaucuc

SEQ ID NO: 42650 - DNA, 21 bp, Homo sapiens
cagtttatagagaacttcaga

SEQ ID NO: 42651 - RNA, 21 nt, RNAi
guuuauagagaacuucagauu

SEQ ID NO: 42652 - RNA, 21 nt, RNAi
uucaaauaucucuugaagucu

SEQ ID NO: 42653 - DNA, 21 bp, Homo sapiens
caaagtttgatgagcagagaa

SEQ ID NO: 42654 - RNA, 21 nt, RNAi
aaguuugaugagcagagaauu

SEQ ID NO: 42655 - RNA, 21 nt, RNAi
uuuucaaacuacucgucucuu

SEQ ID NO: 42656 - DNA, 21 bp, Homo sapiens
cagagaactgctacttatata

SEQ ID NO: 42657 - RNA, 21 nt, RNAi
gagaacugcuacuuauauauu

SEQ ID NO: 42658 - RNA, 21 nt, RNAi
uucucuugacgaugaauauau

SEQ ID NO: 42659 - DNA, 21 bp, Homo sapiens
cattcgaagagagttattcat

SEQ ID NO: 42660 - RNA, 21 nt, RNAi
uucgaagagaguuauucauuu

SEQ ID NO: 42661 - RNA, 21 nt, RNAi
uuaagcuucucucaauaagua

SEQ ID NO: 42662 - DNA, 21 bp, Homo sapiens
catagagacattaagccagag

SEQ ID NO: 42663 - RNA, 21 nt, RNAi
uagagacauuaagccagaguu

SEQ ID NO: 42664 - RNA, 21 nt, RNAi
uuaucucuguaauucggucuc

SEQ ID NO: 42665 - DNA, 21 bp, Homo sapiens
cattaagccagagaacttact

SEQ ID NO: 42666 - RNA, 21 nt, RNAi
uuaagccagagaacuuacuuu

SEQ ID NO: 42667 - RNA, 21 nt, RNAi
uuaauucggucucuugaauga

SEQ ID NO: 42668 - DNA, 21 bp, Homo sapiens
cagagaacttacttcttggat

SEQ ID NO: 42669 - RNA, 21 nt, RNAi
gagaacuuacuucuuggauuu

SEQ ID NO: 42670 - RNA, 21 nt, RNAi
uucucuugaaugaagaaccua

SEQ ID NO: 42671 - DNA, 21 bp, Homo sapiens
cagtacatgctccatcttcca

SEQ ID NO: 42672 - RNA, 21 nt, RNAi
guacaugcuccaucuuccauu

SEQ ID NO: 42673 - RNA, 21 nt, RNAi
uucauguacgagguagaaggu

SEQ ID NO: 42674 - DNA, 21 bp, Homo sapiens
catgctccatcttccaggagg

SEQ ID NO: 42675 - RNA, 21 nt, RNAi
ugcuccaucuuccaggagguu

SEQ ID NO: 42676 - RNA, 21 nt, RNAi
uuacgagguagaagguccucc

SEQ ID NO: 42677 - DNA, 21 bp, Homo sapiens
catcttccaggaggaccactc

SEQ ID NO: 42678 - RNA, 21 nt, RNAi
ucuuccaggaggaccacucuu

SEQ ID NO: 42679 - RNA, 21 nt, RNAi
uuagaagguccuccuggugag

SEQ ID NO: 42680 - DNA, 21 bp, Homo sapiens
caggaggaccactctctgtgg

SEQ ID NO: 42681 - RNA, 21 nt, RNAi
ggaggaccacucucugugguu

SEQ ID NO: 42682 - RNA, 21 nt, RNAi
uuccuccuggugagagacacc

SEQ ID NO: 42683 - DNA, 21 bp, Homo sapiens
catgatgagaaggtggatctc

SEQ ID NO: 42684 - RNA, 21 nt, RNAi
ugaugagaagguggaucucuu

SEQ ID NO: 42685 - RNA, 21 nt, RNAi
uuacuacucuuccaccuagag

SEQ ID NO: 42686 - DNA, 21 bp, Homo sapiens
caaacacataccaagagacct

SEQ ID NO: 42687 - RNA, 21 nt, RNAi
aacacauaccaagagaccuuu

SEQ ID NO: 42688 - RNA, 21 nt, RNAi
uuuuguguaugguucucugga

SEQ ID NO: 42689 - DNA, 21 bp, Homo sapiens
cacataccaagagacctacaa

SEQ ID NO: 42690 - RNA, 21 nt, RNAi
cauaccaagagaccuacaauu

SEQ ID NO: 42691 - RNA, 21 nt, RNAi
uuguaugguucucuggauguu

SEQ ID NO: 42692 - DNA, 21 bp, Homo sapiens
catttcaagactgttgaagca

SEQ ID NO: 42693 - RNA, 21 nt, RNAi
uuucaagacuguugaagcauu

SEQ ID NO: 42694 - RNA, 21 nt, RNAi
uuaaaguucugacaacuucgu

SEQ ID NO: 42695 - DNA, 21 bp, Homo sapiens
caagactgttgaagcataatc

SEQ ID NO: 42696 - RNA, 21 nt, RNAi
agacuguugaagcauaaucuu

SEQ ID NO: 42697 - RNA, 21 nt, RNAi
uuucugacaacuucguauuag

SEQ ID NO: 42698 - DNA, 21 bp, Homo sapiens
cagccagaggccaatgctcag

SEQ ID NO: 42699 - RNA, 21 nt, RNAi
gccagaggccaaugcucaguu

SEQ ID NO: 42700 - RNA, 21 nt, RNAi
uucggucuccgguuacgaguc

SEQ ID NO: 42701 - DNA, 21 bp, Homo sapiens
cagaggccaatgctcagagaa

SEQ ID NO: 42702 - RNA, 21 nt, RNAi
gaggccaaugcucagagaauu

SEQ ID NO: 42703 - RNA, 21 nt, RNAi
uucuccgguuacgagucucuu

SEQ ID NO: 42704 - DNA, 21 bp, Homo sapiens
caatgctcagagaagtacttg

SEQ ID NO: 42705 - RNA, 21 nt, RNAi
augcucagagaaguacuuguu

SEQ ID NO: 42706 - RNA, 21 nt, RNAi
uuuacgagucucuucaugaac

SEQ ID NO: 42707 - DNA, 21 bp, Homo sapiens
caaagaatcagctagcaaaca

SEQ ID NO: 42708 - RNA, 21 nt, RNAi
aagaaucagcuagcaaacauu

SEQ ID NO: 42709 - RNA, 21 nt, RNAi
uuuucuuagucgaucguuugu

SEQ ID NO: 42710 - DNA, 21 bp, Homo sapiens
cagctagcaaacagtcttagg

SEQ ID NO: 42711 - RNA, 21 nt, RNAi
gcuagcaaacagucuuagguu

SEQ ID NO: 42712 - RNA, 21 nt, RNAi
uucgaucguuugucagaaucc

SEQ ID NO: 42713 - DNA, 21 bp, Homo sapiens
caaacagtcttaggaatcgtg

SEQ ID NO: 42714 - RNA, 21 nt, RNAi
aacagucuuaggaaucguguu

SEQ ID NO: 42715 - RNA, 21 nt, RNAi
uuuugucagaauccuuagcac

SEQ ID NO: 42716 - DNA, 21 bp, Homo sapiens
cagtcttaggaatcgtgcagg

SEQ ID NO: 42717 - RNA, 21 nt, RNAi
gucuuaggaaucgugcagguu

SEQ ID NO: 42718 - RNA, 21 nt, RNAi
uucagaauccuuagcacgucc

SEQ ID NO: 42719 - DNA, 21 bp, Homo sapiens
catataacctgacaggaacat

SEQ ID NO: 42720 - RNA, 21 nt, RNAi
uauaaccugacaggaacauuu

SEQ ID NO: 42721 - RNA, 21 nt, RNAi
uuauauuggacuguccuugua

SEQ ID NO: 42722 - DNA, 21 bp, Homo sapiens
caggaacatgctactgaagtt

SEQ ID NO: 42723 - RNA, 21 nt, RNAi
ggaacaugcuacugaaguuuu

SEQ ID NO: 42724 - RNA, 21 nt, RNAi
uuccuuguacgaugacuucaa

SEQ ID NO: 42725 - DNA, 21 bp, Homo sapiens
caatctagaacgctacacaag

SEQ ID NO: 42726 - RNA, 21 nt, RNAi
aucuagaacgcuacacaaguu

SEQ ID NO: 42727 - RNA, 21 nt, RNAi
uuuagaucuugcgauguguuc

SEQ ID NO: 42728 - DNA, 21 bp, Homo sapiens
cagcaggtgtgccttaacctc

SEQ ID NO: 42729 - RNA, 21 nt, RNAi
gcaggugugccuuaaccucuu

SEQ ID NO: 42730 - RNA, 21 nt, RNAi
uucguccacacggaauuggag

SEQ ID NO: 42731 - DNA, 21 bp, Homo sapiens
cagaaagctccacatcaataa

SEQ ID NO: 42732 - RNA, 21 nt, RNAi
gaaagcuccacaucaauaauu

SEQ ID NO: 42733 - RNA, 21 nt, RNAi
uucuuucgagguguaguuauu

SEQ ID NO: 42734 - DNA, 21 bp, Homo sapiens
cacatcaataaacatgacact

SEQ ID NO: 42735 - RNA, 21 nt, RNAi
caucaauaaacaugacacuuu

SEQ ID NO: 42736 - RNA, 21 nt, RNAi
uuguaguuauuuguacuguga

SEQ ID NO: 42737 - DNA, 21 bp, Homo sapiens
catcaataaacatgacactct

SEQ ID NO: 42738 - RNA, 21 nt, RNAi
ucaauaaacaugacacucuuu

SEQ ID NO: 42739 - RNA, 21 nt, RNAi
uuaguuauuuguacugugaga

SEQ ID NO: 42740 - DNA, 21 bp, Homo sapiens
caataaacatgacactctgaa

SEQ ID NO: 42741 - RNA, 21 nt, RNAi
auaaacaugacacucugaauu

SEQ ID NO: 42742 - RNA, 21 nt, RNAi
uuuauuuguacugugagacuu

SEQ ID NO: 42743 - DNA, 21 bp, Homo sapiens
catgacactctgaagtgaaag

SEQ ID NO: 42744 - RNA, 21 nt, RNAi
ugacacucugaagugaaaguu

SEQ ID NO: 42745 - RNA, 21 nt, RNAi
uuacugugagacuucacuuuc

SEQ ID NO: 42746 - DNA, 21 bp, Homo sapiens
cactctgaagtgaaagtagcc

SEQ ID NO: 42747 - RNA, 21 nt, RNAi
cucugaagugaaaguagccuu

SEQ ID NO: 42748 - RNA, 21 nt, RNAi
uugagacuucacuuucaucgg

SEQ ID NO: 42749 - DNA, 21 bp, Homo sapiens
cacgagaattgtgctacttat

SEQ ID NO: 42750 - RNA, 21 nt, RNAi
cgagaauugugcuacuuauuu

SEQ ID NO: 42751 - RNA, 21 nt, RNAi
uugcucuuaacacgaugaaua

SEQ ID NO: 42752 - DNA, 21 bp, Homo sapiens
cataatctggaggcaaggttc

SEQ ID NO: 42753 - RNA, 21 nt, RNAi
uaaucuggaggcaagguucuu

SEQ ID NO: 42754 - RNA, 21 nt, RNAi
uuauuagaccuccguuccaag

SEQ ID NO: 42755 - DNA, 21 bp, Homo sapiens
cagcctgtgctaggcatggtg

SEQ ID NO: 42756 - RNA, 21 nt, RNAi
gccugugcuaggcaugguguu

SEQ ID NO: 42757 - RNA, 21 nt, RNAi
uucggacacgauccguaccac

SEQ ID NO: 42758 - DNA, 21 bp, Homo sapiens
catggtgtcttcacaggaggc

SEQ ID NO: 42759 - RNA, 21 nt, RNAi
uggugucuucacaggaggcuu

SEQ ID NO: 42760 - RNA, 21 nt, RNAi
uuaccacagaaguguccuccg

SEQ ID NO: 42761 - DNA, 21 bp, Homo sapiens
cacaggaggcaaatccagagc

SEQ ID NO: 42762 - RNA, 21 nt, RNAi
caggaggcaaauccagagcuu

SEQ ID NO: 42763 - RNA, 21 nt, RNAi
uuguccuccguuuaggucucg

SEQ ID NO: 42764 - DNA, 21 bp, Homo sapiens
caggaggcaaatccagagcct

SEQ ID NO: 42765 - RNA, 21 nt, RNAi
ggaggcaaauccagagccuuu

SEQ ID NO: 42766 - RNA, 21 nt, RNAi
uuccuccguuuaggucucgga

SEQ ID NO: 42767 - DNA, 21 bp, Homo sapiens
caaatccagagcctggctgtg

SEQ ID NO: 42768 - RNA, 21 nt, RNAi
aauccagagccuggcuguguu

SEQ ID NO: 42769 - RNA, 21 nt, RNAi
uuuuaggucucggaccgacac

SEQ ID NO: 42770 - DNA, 21 bp, Homo sapiens
cagttaaggagctgtgcaata

SEQ ID NO: 42771 - RNA, 21 nt, RNAi
guuaaggagcugugcaauauu

SEQ ID NO: 42772 - RNA, 21 nt, RNAi
uucaauuccucgacacguuau

SEQ ID NO: 42773 - DNA, 21 bp, Homo sapiens
caataaccttcctagtacctg

SEQ ID NO: 42774 - RNA, 21 nt, RNAi
auaaccuuccuaguaccuguu

SEQ ID NO: 42775 - RNA, 21 nt, RNAi
uuuauuggaaggaucauggac

SEQ ID NO: 42776 - DNA, 21 bp, Homo sapiens
cattcctttaggaatgctgtg

SEQ ID NO: 42777 - RNA, 21 nt, RNAi
uuccuuuaggaaugcuguguu

SEQ ID NO: 42778 - RNA, 21 nt, RNAi
uuaaggaaauccuuacgacac

SEQ ID NO: 42779 - DNA, 21 bp, Homo sapiens
cacgtgctctacctccattta

SEQ ID NO: 42780 - RNA, 21 nt, RNAi
cgugcucuaccuccauuuauu

SEQ ID NO: 42781 - RNA, 21 nt, RNAi
uugcacgagauggagguaaau

SEQ ID NO: 42782 - DNA, 21 bp, Homo sapiens
cagaagaggccatgtgtctca

SEQ ID NO: 42783 - RNA, 21 nt, RNAi
gaagaggccaugugucucauu

SEQ ID NO: 42784 - RNA, 21 nt, RNAi
uucuucuccgguacacagagu

SEQ ID NO: 42785 - DNA, 21 bp, Homo sapiens
catgtgtctcagagctgttaa

SEQ ID NO: 42786 - RNA, 21 nt, RNAi
ugugucucagagcuguuaauu

SEQ ID NO: 42787 - RNA, 21 nt, RNAi
uuacacagagucucgacaauu

SEQ ID NO: 42788 - DNA, 21 bp, Homo sapiens
cattggagtcatagcatgtgt

SEQ ID NO: 42789 - RNA, 21 nt, RNAi
uuggagucauagcauguguuu

SEQ ID NO: 42790 - RNA, 21 nt, RNAi
uuaaccucaguaucguacaca

SEQ ID NO: 42791 - DNA, 21 bp, Homo sapiens
catagcatgtgtgtaaacttt

SEQ ID NO: 42792 - RNA, 21 nt, RNAi
uagcauguguguaaacuuuuu

SEQ ID NO: 42793 - RNA, 21 nt, RNAi
uuaucguacacacauuugaaa

SEQ ID NO: 42794 - DNA, 21 bp, Homo sapiens
gatatctcagtggcggacgag

SEQ ID NO: 42795 - RNA, 21 nt, RNAi
uaucucaguggcggacgaguu

SEQ ID NO: 42796 - RNA, 21 nt, RNAi
uuauagagucaccgccugcuc

SEQ ID NO: 42797 - DNA, 21 bp, Homo sapiens
gagtgtccttggcgctgcctt

SEQ ID NO: 42798 - RNA, 21 nt, RNAi
guguccuuggcgcugccuuuu

SEQ ID NO: 42799 - RNA, 21 nt, RNAi
uucacaggaaccgcgacggaa

SEQ ID NO: 42800 - DNA, 21 bp, Homo sapiens
gaggcatcatggaccgatcta

SEQ ID NO: 42801 - RNA, 21 nt, RNAi
ggcaucauggaccgaucuauu

SEQ ID NO: 42802 - RNA, 21 nt, RNAi
uuccguaguaccuggcuagau

SEQ ID NO: 42803 - DNA, 21 bp, Homo sapiens
gacctgttaaggctacagctc

SEQ ID NO: 42804 - RNA, 21 nt, RNAi
ccuguuaaggcuacagcucuu

SEQ ID NO: 42805 - RNA, 21 nt, RNAi
uuggacaauuccgaugucgag

SEQ ID NO: 42806 - DNA, 21 bp, Homo sapiens
gactcagcaaattccttgtca

SEQ ID NO: 42807 - RNA, 21 nt, RNAi
cucagcaaauuccuugucauu

SEQ ID NO: 42808 - RNA, 21 nt, RNAi
uugagucguuuaaggaacagu

SEQ ID NO: 42809 - DNA, 21 bp, Homo sapiens
gaatccattacctgtaaatag

SEQ ID NO: 42810 - RNA, 21 nt, RNAi
auccauuaccuguaaauaguu

SEQ ID NO: 42811 - RNA, 21 nt, RNAi
uuuagguaauggacauuuauc

SEQ ID NO: 42812 - DNA, 21 bp, Homo sapiens
gaatcagaagcagaagcaatt

SEQ ID NO: 42813 - RNA, 21 nt, RNAi
aucagaagcagaagcaauuuu

SEQ ID NO: 42814 - RNA, 21 nt, RNAi
uuuagucuucgucuucguuaa

SEQ ID NO: 42815 - DNA, 21 bp, Homo sapiens
gaagcagaagcaattgcaggc

SEQ ID NO: 42816 - RNA, 21 nt, RNAi
agcagaagcaauugcaggcuu

SEQ ID NO: 42817 - RNA, 21 nt, RNAi
uuucgucuucguuaacguccg

SEQ ID NO: 42818 - DNA, 21 bp, Homo sapiens
gaagcaattgcaggcaaccag

SEQ ID NO: 42819 - RNA, 21 nt, RNAi
agcaauugcaggcaaccaguu

SEQ ID NO: 42820 - RNA, 21 nt, RNAi
uuucguuaacguccguugguc

SEQ ID NO: 42821 - DNA, 21 bp, Homo sapiens
gaagactttgaaattggtcgc

SEQ ID NO: 42822 - RNA, 21 nt, RNAi
agacuuugaaauuggucgcuu

SEQ ID NO: 42823 - RNA, 21 nt, RNAi
uuucugaaacuuuaaccagcg

SEQ ID NO: 42824 - DNA, 21 bp, Homo sapiens
gagaaagccggagtggagcat

SEQ ID NO: 42825 - RNA, 21 nt, RNAi
gaaagccggaguggagcauuu

SEQ ID NO: 42826 - RNA, 21 nt, RNAi
uucuuucggccucaccucgua

SEQ ID NO: 42827 - DNA, 21 bp, Homo sapiens
gaaagccggagtggagcatca

SEQ ID NO: 42828 - RNA, 21 nt, RNAi
aagccggaguggagcaucauu

SEQ ID NO: 42829 - RNA, 21 nt, RNAi
uuuucggccucaccucguagu

SEQ ID NO: 42830 - DNA, 21 bp, Homo sapiens
gagtggagcatcagctcagaa

SEQ ID NO: 42831 - RNA, 21 nt, RNAi
guggagcaucagcucagaauu

SEQ ID NO: 42832 - RNA, 21 nt, RNAi
uucaccucguagucgagucuu

SEQ ID NO: 42833 - DNA, 21 bp, Homo sapiens
gagcatcagctcagaagagaa

SEQ ID NO: 42834 - RNA, 21 nt, RNAi
gcaucagcucagaagagaauu

SEQ ID NO: 42835 - RNA, 21 nt, RNAi
uucguagucgagucuucucuu

SEQ ID NO: 42836 - DNA, 21 bp, Homo sapiens
gaagagaagtagaaatacagt

SEQ ID NO: 42837 - RNA, 21 nt, RNAi
agagaaguagaaauacaguuu

SEQ ID NO: 42838 - RNA, 21 nt, RNAi
uuucucuucaucuuuauguca

SEQ ID NO: 42839 - DNA, 21 bp, Homo sapiens
gactgtatggttatttccatg

SEQ ID NO: 42840 - RNA, 21 nt, RNAi
cuguaugguuauuuccauguu

SEQ ID NO: 42841 - RNA, 21 nt, RNAi
uugacauaccaauaaagguac

SEQ ID NO: 42842 - DNA, 21 bp, Homo sapiens
gatgctaccagagtctaccta

SEQ ID NO: 42843 - RNA, 21 nt, RNAi
ugcuaccagagucuaccuauu

SEQ ID NO: 42844 - RNA, 21 nt, RNAi
uuacgauggucucagauggau

SEQ ID NO: 42845 - DNA, 21 bp, Homo sapiens
gagtctacctaattctggaat

SEQ ID NO: 42846 - RNA, 21 nt, RNAi
gucuaccuaauucuggaauuu

SEQ ID NO: 42847 - RNA, 21 nt, RNAi
uucagauggauuaagaccuua

SEQ ID NO: 42848 - DNA, 21 bp, Homo sapiens
gaatatgcaccacttggaaca

SEQ ID NO: 42849 - RNA, 21 nt, RNAi
auaugcaccacuuggaacauu

SEQ ID NO: 42850 - RNA, 21 nt, RNAi
uuuauacguggugaaccuugu

SEQ ID NO: 42851 - DNA, 21 bp, Homo sapiens
gaacagtttatagagaacttc

SEQ ID NO: 42852 - RNA, 21 nt, RNAi
acaguuuauagagaacuucuu

SEQ ID NO: 42853 - RNA, 21 nt, RNAi
uuugucaaauaucucuugaag

SEQ ID NO: 42854 - DNA, 21 bp, Homo sapiens
gagaacttcagaaactttcaa

SEQ ID NO: 42855 - RNA, 21 nt, RNAi
gaacuucagaaacuuucaauu

SEQ ID NO: 42856 - RNA, 21 nt, RNAi
uucuugaagucuuugaaaguu

SEQ ID NO: 42857 - DNA, 21 bp, Homo sapiens
gaacttcagaaactttcaaag

SEQ ID NO: 42858 - RNA, 21 nt, RNAi
acuucagaaacuuucaaaguu

SEQ ID NO: 42859 - RNA, 21 nt, RNAi
uuugaagucuuugaaaguuuc

SEQ ID NO: 42860 - DNA, 21 bp, Homo sapiens
gatgagcagagaactgctact

SEQ ID NO: 42861 - RNA, 21 nt, RNAi
ugagcagagaacugcuacuuu

SEQ ID NO: 42862 - RNA, 21 nt, RNAi
uuacucgucucuugacgauga

SEQ ID NO: 42863 - DNA, 21 bp, Homo sapiens
gagcagagaactgctacttat

SEQ ID NO: 42864 - RNA, 21 nt, RNAi
gcagagaacugcuacuuauuu

SEQ ID NO: 42865 - RNA, 21 nt, RNAi
uucgucucuugacgaugaaua

SEQ ID NO: 42866 - DNA, 21 bp, Homo sapiens
gagaactgctacttatataac

SEQ ID NO: 42867 - RNA, 21 nt, RNAi
gaacugcuacuuauauaacuu

SEQ ID NO: 42868 - RNA, 21 nt, RNAi
uucuugacgaugaauauauug

SEQ ID NO: 42869 - DNA, 21 bp, Homo sapiens
gaactgctacttatataacag

SEQ ID NO: 42870 - RNA, 21 nt, RNAi
acugcuacuuauauaacaguu

SEQ ID NO: 42871 - RNA, 21 nt, RNAi
uuugacgaugaauauauuguc

SEQ ID NO: 42872 - DNA, 21 bp, Homo sapiens
gaagagagttattcatagaga

SEQ ID NO: 42873 - RNA, 21 nt, RNAi
agagaguuauucauagagauu

SEQ ID NO: 42874 - RNA, 21 nt, RNAi
uuucucucaauaaguaucucu

SEQ ID NO: 42875 - DNA, 21 bp, Homo sapiens
gagagttattcatagagacat

SEQ ID NO: 42876 - RNA, 21 nt, RNAi
gaguuauucauagagacauuu

SEQ ID NO: 42877 - RNA, 21 nt, RNAi
uucucaauaaguaucucugua

SEQ ID NO: 42878 - DNA, 21 bp, Homo sapiens
gagacattaagccagagaact

SEQ ID NO: 42879 - RNA, 21 nt, RNAi
gacauuaagccagagaacuuu

SEQ ID NO: 42880 - RNA, 21 nt, RNAi
uucuguaauucggucucuuga

SEQ ID NO: 42881 - DNA, 21 bp, Homo sapiens
gacattaagccagagaactta

SEQ ID NO: 42882 - RNA, 21 nt, RNAi
cauuaagccagagaacuuauu

SEQ ID NO: 42883 - RNA, 21 nt, RNAi
uuguaauucggucucuugaau

SEQ ID NO: 42884 - DNA, 21 bp, Homo sapiens
gagaacttacttcttggatca

SEQ ID NO: 42885 - RNA, 21 nt, RNAi
gaacuuacuucuuggaucauu

SEQ ID NO: 42886 - RNA, 21 nt, RNAi
uucuugaaugaagaaccuagu

SEQ ID NO: 42887 - DNA, 21 bp, Homo sapiens
gaacttacttcttggatcagc

SEQ ID NO: 42888 - RNA, 21 nt, RNAi
acuuacuucuuggaucagcuu

SEQ ID NO: 42889 - RNA, 21 nt, RNAi
uuugaaugaagaaccuagucg

SEQ ID NO: 42890 - DNA, 21 bp, Homo sapiens
gaggaccactctctgtggcac

SEQ ID NO: 42891 - RNA, 21 nt, RNAi
ggaccacucucuguggcacuu

SEQ ID NO: 42892 - RNA, 21 nt, RNAi
uuccuggugagagacaccgug

SEQ ID NO: 42893 - DNA, 21 bp, Homo sapiens
gaaatgattgaaggtcggatg

SEQ ID NO: 42894 - RNA, 21 nt, RNAi
aaugauugaaggucggauguu

SEQ ID NO: 42895 - RNA, 21 nt, RNAi
uuuuacuaacuuccagccuac

SEQ ID NO: 42896 - DNA, 21 bp, Homo sapiens
gattgaaggtcggatgcatga

SEQ ID NO: 42897 - RNA, 21 nt, RNAi
uugaaggucggaugcaugauu

SEQ ID NO: 42898 - RNA, 21 nt, RNAi
uuaacuuccagccuacguacu

SEQ ID NO: 42899 - DNA, 21 bp, Homo sapiens
gaaggtcggatgcatgatgag

SEQ ID NO: 42900 - RNA, 21 nt, RNAi
aggucggaugcaugaugaguu

SEQ ID NO: 42901 - RNA, 21 nt, RNAi
uuuccagccuacguacuacuc

SEQ ID NO: 42902 - DNA, 21 bp, Homo sapiens
gatgcatgatgagaaggtgga

SEQ ID NO: 42903 - RNA, 21 nt, RNAi
ugcaugaugagaagguggauu

SEQ ID NO: 42904 - RNA, 21 nt, RNAi
uuacguacuacucuuccaccu

SEQ ID NO: 42905 - DNA, 21 bp, Homo sapiens
gatgagaaggtggatctctgg

SEQ ID NO: 42906 - RNA, 21 nt, RNAi
ugagaagguggaucucugguu

SEQ ID NO: 42907 - RNA, 21 nt, RNAi
uuacucuuccaccuagagacc

SEQ ID NO: 42908 - DNA, 21 bp, Homo sapiens
gagaaggtggatctctggagc

SEQ ID NO: 42909 - RNA, 21 nt, RNAi
gaagguggaucucuggagcuu

SEQ ID NO: 42910 - RNA, 21 nt, RNAi
uucuuccaccuagagaccucg

SEQ ID NO: 42911 - DNA, 21 bp, Homo sapiens
gaaggtggatctctggagcct

SEQ ID NO: 42912 - RNA, 21 nt, RNAi
agguggaucucuggagccuuu

SEQ ID NO: 42913 - RNA, 21 nt, RNAi
uuuccaccuagagaccucgga

SEQ ID NO: 42914 - DNA, 21 bp, Homo sapiens
gatctctggagccttggagtt

SEQ ID NO: 42915 - RNA, 21 nt, RNAi
ucucuggagccuuggaguuuu

SEQ ID NO: 42916 - RNA, 21 nt, RNAi
uuagagaccucggaaccucaa

SEQ ID NO: 42917 - DNA, 21 bp, Homo sapiens
gagccttggagttctttgcta

SEQ ID NO: 42918 - RNA, 21 nt, RNAi
gccuuggaguucuuugcuauu

SEQ ID NO: 42919 - RNA, 21 nt, RNAi
uucggaaccucaagaaacgau

SEQ ID NO: 42920 - DNA, 21 bp, Homo sapiens
gaggcaaacacataccaagag

SEQ ID NO: 42921 - RNA, 21 nt, RNAi
ggcaaacacauaccaagaguu

SEQ ID NO: 42922 - RNA, 21 nt, RNAi
uuccguuuguguaugguucuc

SEQ ID NO: 42923 - DNA, 21 bp, Homo sapiens
gacctcatttcaagactgttg

SEQ ID NO: 42924 - RNA, 21 nt, RNAi
ccucauuucaagacuguuguu

SEQ ID NO: 42925 - RNA, 21 nt, RNAi
uuggaguaaaguucugacaac

SEQ ID NO: 42926 - DNA, 21 bp, Homo sapiens
gaggccaatgctcagagaagt

SEQ ID NO: 42927 - RNA, 21 nt, RNAi
ggccaaugcucagagaaguuu

SEQ ID NO: 42928 - RNA, 21 nt, RNAi
uuccgguuacgagucucuuca

SEQ ID NO: 42929 - DNA, 21 bp, Homo sapiens
gatcacagcaaattcatcaaa

SEQ ID NO: 42930 - RNA, 21 nt, RNAi
ucacagcaaauucaucaaauu

SEQ ID NO: 42931 - RNA, 21 nt, RNAi
uuagugucguuuaaguaguuu

SEQ ID NO: 42932 - DNA, 21 bp, Homo sapiens
gaatcagctagcaaacagtct

SEQ ID NO: 42933 - RNA, 21 nt, RNAi
aucagcuagcaaacagucuuu

SEQ ID NO: 42934 - RNA, 21 nt, RNAi
uuuagucgaucguuugucaga

SEQ ID NO: 42935 - DNA, 21 bp, Homo sapiens
gacaggaacatgctactgaag

SEQ ID NO: 42936 - RNA, 21 nt, RNAi
caggaacaugcuacugaaguu

SEQ ID NO: 42937 - RNA, 21 nt, RNAi
uuguccuuguacgaugacuuc

SEQ ID NO: 42938 - DNA, 21 bp, Homo sapiens
gaacatgctactgaagtttat

SEQ ID NO: 42939 - RNA, 21 nt, RNAi
acaugcuacugaaguuuauuu

SEQ ID NO: 42940 - RNA, 21 nt, RNAi
uuuguacgaugacuucaaaua

SEQ ID NO: 42941 - DNA, 21 bp, Homo sapiens
gaacgctacacaagaaatatt

SEQ ID NO: 42942 - RNA, 21 nt, RNAi
acgcuacacaagaaauauuuu

SEQ ID NO: 42943 - RNA, 21 nt, RNAi
uuugcgauguguucuuuauaa

SEQ ID NO: 42944 - DNA, 21 bp, Homo sapiens
gaaagctccacatcaataaac

SEQ ID NO: 42945 - RNA, 21 nt, RNAi
aagcuccacaucaauaaacuu

SEQ ID NO: 42946 - RNA, 21 nt, RNAi
uuuucgagguguaguuauuug

SEQ ID NO: 42947 - DNA, 21 bp, Homo sapiens
gacactctgaagtgaaagtag

SEQ ID NO: 42948 - RNA, 21 nt, RNAi
cacucugaagugaaaguaguu

SEQ ID NO: 42949 - RNA, 21 nt, RNAi
uugugagacuucacuuucauc

SEQ ID NO: 42950 - DNA, 21 bp, Homo sapiens
gaagtgaaagtagccacgaga

SEQ ID NO: 42951 - RNA, 21 nt, RNAi
agugaaaguagccacgagauu

SEQ ID NO: 42952 - RNA, 21 nt, RNAi
uuucacuuucaucggugcucu

SEQ ID NO: 42953 - DNA, 21 bp, Homo sapiens
gaaagtagccacgagaattgt

SEQ ID NO: 42954 - RNA, 21 nt, RNAi
aaguagccacgagaauuguuu

SEQ ID NO: 42955 - RNA, 21 nt, RNAi
uuuucaucggugcucuuaaca

SEQ ID NO: 42956 - DNA, 21 bp, Homo sapiens
gagaattgtgctacttatact

SEQ ID NO: 42957 - RNA, 21 nt, RNAi
gaauugugcuacuuauacuuu

SEQ ID NO: 42958 - RNA, 21 nt, RNAi
uucuuaacacgaugaauauga

SEQ ID NO: 42959 - DNA, 21 bp, Homo sapiens
gaattgtgctacttatactgg

SEQ ID NO: 42960 - RNA, 21 nt, RNAi
auugugcuacuuauacugguu

SEQ ID NO: 42961 - RNA, 21 nt, RNAi
uuuaacacgaugaauaugacc

SEQ ID NO: 42962 - DNA, 21 bp, Homo sapiens
gaggcaaggttcgactgcagc

SEQ ID NO: 42963 - RNA, 21 nt, RNAi
ggcaagguucgacugcagcuu

SEQ ID NO: 42964 - RNA, 21 nt, RNAi
uuccguuccaagcugacgucg

SEQ ID NO: 42965 - DNA, 21 bp, Homo sapiens
gaggcaaatccagagcctggc

SEQ ID NO: 42966 - RNA, 21 nt, RNAi
ggcaaauccagagccuggcuu

SEQ ID NO: 42967 - RNA, 21 nt, RNAi
uuccguuuaggucucggaccg

SEQ ID NO: 42968 - DNA, 21 bp, Homo sapiens
gatcagttaaggagctgtgca

SEQ ID NO: 42969 - RNA, 21 nt, RNAi
ucaguuaaggagcugugcauu

SEQ ID NO: 42970 - RNA, 21 nt, RNAi
uuagucaauuccucgacacgu

SEQ ID NO: 42971 - DNA, 21 bp, Homo sapiens
gagctgtgcaataaccttcct

SEQ ID NO: 42972 - RNA, 21 nt, RNAi
gcugugcaauaaccuuccuuu

SEQ ID NO: 42973 - RNA, 21 nt, RNAi
uucgacacguuauuggaagga

SEQ ID NO: 42974 - DNA, 21 bp, Homo sapiens
gagtgagtgtgtaacttattg

SEQ ID NO: 42975 - RNA, 21 nt, RNAi
gugaguguguaacuuauuguu

SEQ ID NO: 42976 - RNA, 21 nt, RNAi
uucacucacacauugaauaac

SEQ ID NO: 42977 - DNA, 21 bp, Homo sapiens
gaagcctggtaaagctgttgg

SEQ ID NO: 42978 - RNA, 21 nt, RNAi
agccugguaaagcuguugguu

SEQ ID NO: 42979 - RNA, 21 nt, RNAi
uuucggaccauuucgacaacc

SEQ ID NO: 42980 - DNA, 21 bp, Homo sapiens
gaatgctgtgtgtctgtccgg

SEQ ID NO: 42981 - RNA, 21 nt, RNAi
augcugugugucuguccgguu

SEQ ID NO: 42982 - RNA, 21 nt, RNAi
uuuacgacacacagacaggcc

SEQ ID NO: 42983 - DNA, 21 bp, Homo sapiens
gaacacgtgctctacctccat

SEQ ID NO: 42984 - RNA, 21 nt, RNAi
acacgugcucuaccuccauuu

SEQ ID NO: 42985 - RNA, 21 nt, RNAi
uuugugcacgagauggaggua

SEQ ID NO: 42986 - DNA, 21 bp, Homo sapiens
gatacagaagaggccatgtgt

SEQ ID NO: 42987 - RNA, 21 nt, RNAi
uacagaagaggccauguguuu

SEQ ID NO: 42988 - RNA, 21 nt, RNAi
uuaugucuucuccgguacaca

SEQ ID NO: 42989 - DNA, 21 bp, Homo sapiens
gaagaggccatgtgtctcaga

SEQ ID NO: 42990 - RNA, 21 nt, RNAi
agaggccaugugucucagauu

SEQ ID NO: 42991 - RNA, 21 nt, RNAi
uuucuccgguacacagagucu

SEQ ID NO: 42992 - DNA, 21 bp, Homo sapiens
gaggccatgtgtctcagagct

SEQ ID NO: 42993 - RNA, 21 nt, RNAi
ggccaugugucucagagcuuu

SEQ ID NO: 42994 - RNA, 21 nt, RNAi
uuccgguacacagagucucga

SEQ ID NO: 42995 - DNA, 21 bp, Homo sapiens
gagtcatagcatgtgtgtaaa

SEQ ID NO: 42996 - RNA, 21 nt, RNAi
gucauagcauguguguaaauu

SEQ ID NO: 42997 - RNA, 21 nt, RNAi
uucaguaucguacacacauuu

SEQ ID NO: 42998 - DNA, 21 bp, Homo sapiens
tatctcagtggcggacgagga

SEQ ID NO: 42999 - RNA, 21 nt, RNAi
ucucaguggcggacgaggauu

SEQ ID NO: 43000 - RNA, 21 nt, RNAi
uuagagucaccgccugcuccu

SEQ ID NO: 43001 - DNA, 21 bp, Homo sapiens
taggatactgcttgttactta

SEQ ID NO: 43002 - RNA, 21 nt, RNAi
ggauacugcuuguuacuuauu

SEQ ID NO: 43003 - RNA, 21 nt, RNAi
uuccuaugacgaacaaugaau

SEQ ID NO: 43004 - DNA, 21 bp, Homo sapiens
tacttattacagctagaggca

SEQ ID NO: 43005 - RNA, 21 nt, RNAi
cuuauuacagcuagaggcauu

SEQ ID NO: 43006 - RNA, 21 nt, RNAi
uugaauaaugucgaucuccgu

SEQ ID NO: 43007 - DNA, 21 bp, Homo sapiens
tattacagctagaggcatcat

SEQ ID NO: 43008 - RNA, 21 nt, RNAi
uuacagcuagaggcaucauuu

SEQ ID NO: 43009 - RNA, 21 nt, RNAi
uuaaugucgaucuccguagua

SEQ ID NO: 43010 - DNA, 21 bp, Homo sapiens
tacagctagaggcatcatgga

SEQ ID NO: 43011 - RNA, 21 nt, RNAi
cagcuagaggcaucauggauu

SEQ ID NO: 43012 - RNA, 21 nt, RNAi
uugucgaucuccguaguaccu

SEQ ID NO: 43013 - DNA, 21 bp, Homo sapiens
tagaggcatcatggaccgatc

SEQ ID NO: 43014 - RNA, 21 nt, RNAi
gaggcaucauggaccgaucuu

SEQ ID NO: 43015 - RNA, 21 nt, RNAi
uucuccguaguaccuggcuag

SEQ ID NO: 43016 - DNA, 21 bp, Homo sapiens
taaggctacagctccagttgg

SEQ ID NO: 43017 - RNA, 21 nt, RNAi
aggcuacagcuccaguugguu

SEQ ID NO: 43018 - RNA, 21 nt, RNAi
uuuccgaugucgaggucaacc

SEQ ID NO: 43019 - DNA, 21 bp, Homo sapiens
tacagctccagttggaggtcc

SEQ ID NO: 43020 - RNA, 21 nt, RNAi
cagcuccaguuggagguccuu

SEQ ID NO: 43021 - RNA, 21 nt, RNAi
uugucgaggucaaccuccagg

SEQ ID NO: 43022 - DNA, 21 bp, Homo sapiens
tacctgtaaatagtggccagg

SEQ ID NO: 43023 - RNA, 21 nt, RNAi
ccuguaaauaguggccagguu

SEQ ID NO: 43024 - RNA, 21 nt, RNAi
uuggacauuuaucaccggucc

SEQ ID NO: 43025 - DNA, 21 bp, Homo sapiens
taaatagtggccaggctcagc

SEQ ID NO: 43026 - RNA, 21 nt, RNAi
aauaguggccaggcucagcuu

SEQ ID NO: 43027 - RNA, 21 nt, RNAi
uuuuaucaccgguccgagucg

SEQ ID NO: 43028 - DNA, 21 bp, Homo sapiens
tacctcatcctgtctccaggc

SEQ ID NO: 43029 - RNA, 21 nt, RNAi
ccucauccugucuccaggcuu

SEQ ID NO: 43030 - RNA, 21 nt, RNAi
uuggaguaggacagagguccg

SEQ ID NO: 43031 - DNA, 21 bp, Homo sapiens
taatcctgaggaggaactggc

SEQ ID NO: 43032 - RNA, 21 nt, RNAi
auccugaggaggaacuggcuu

SEQ ID NO: 43033 - RNA, 21 nt, RNAi
uuuaggacuccuccuugaccg

SEQ ID NO: 43034 - DNA, 21 bp, Homo sapiens
tattctggctcttaaagtgtt

SEQ ID NO: 43035 - RNA, 21 nt, RNAi
uucuggcucuuaaaguguuuu

SEQ ID NO: 43036 - RNA, 21 nt, RNAi
uuaagaccgagaauuucacaa

SEQ ID NO: 43037 - DNA, 21 bp, Homo sapiens
tatttaaagctcagctggaga

SEQ ID NO: 43038 - RNA, 21 nt, RNAi
uuuaaagcucagcuggagauu

SEQ ID NO: 43039 - RNA, 21 nt, RNAi
uuaaauuucgagucgaccucu

SEQ ID NO: 43040 - DNA, 21 bp, Homo sapiens
taaagctcagctggagaaagc

SEQ ID NO: 43041 - RNA, 21 nt, RNAi
aagcucagcuggagaaagcuu

SEQ ID NO: 43042 - RNA, 21 nt, RNAi
uuuucgagucgaccucuuucg

SEQ ID NO: 43043 - DNA, 21 bp, Homo sapiens
tagactgtatggttatttcca

SEQ ID NO: 43044 - RNA, 21 nt, RNAi
gacuguaugguuauuuccauu

SEQ ID NO: 43045 - RNA, 21 nt, RNAi
uucugacauaccaauaaaggu

SEQ ID NO: 43046 - DNA, 21 bp, Homo sapiens
tatggttatttccatgatgct

SEQ ID NO: 43047 - RNA, 21 nt, RNAi
ugguuauuuccaugaugcuuu

SEQ ID NO: 43048 - RNA, 21 nt, RNAi
uuaccaauaaagguacuacga

SEQ ID NO: 43049 - DNA, 21 bp, Homo sapiens
tatttccatgatgctaccaga

SEQ ID NO: 43050 - RNA, 21 nt, RNAi
uuuccaugaugcuaccagauu

SEQ ID NO: 43051 - RNA, 21 nt, RNAi
uuaaagguacuacgauggucu

SEQ ID NO: 43052 - DNA, 21 bp, Homo sapiens
taccagagtctacctaattct

SEQ ID NO: 43053 - RNA, 21 nt, RNAi
ccagagucuaccuaauucuuu

SEQ ID NO: 43054 - RNA, 21 nt, RNAi
uuggucucagauggauuaaga

SEQ ID NO: 43055 - DNA, 21 bp, Homo sapiens
tacctaattctggaatatgca

SEQ ID NO: 43056 - RNA, 21 nt, RNAi
ccuaauucuggaauaugcauu

SEQ ID NO: 43057 - RNA, 21 nt, RNAi
uuggauuaagaccuuauacgu

SEQ ID NO: 43058 - DNA, 21 bp, Homo sapiens
taattctggaatatgcaccac

SEQ ID NO: 43059 - RNA, 21 nt, RNAi
auucuggaauaugcaccacuu

SEQ ID NO: 43060 - RNA, 21 nt, RNAi
uuuaagaccuuauacguggug

SEQ ID NO: 43061 - DNA, 21 bp, Homo sapiens
tatgcaccacttggaacagtt

SEQ ID NO: 43062 - RNA, 21 nt, RNAi
ugcaccacuuggaacaguuuu

SEQ ID NO: 43063 - RNA, 21 nt, RNAi
uuacguggugaaccuugucaa

SEQ ID NO: 43064 - DNA, 21 bp, Homo sapiens
tagagaacttcagaaactttc

SEQ ID NO: 43065 - RNA, 21 nt, RNAi
gagaacuucagaaacuuucuu

SEQ ID NO: 43066 - RNA, 21 nt, RNAi
uucucuugaagucuuugaaag

SEQ ID NO: 43067 - DNA, 21 bp, Homo sapiens
tataacagaattggcaaatgc

SEQ ID NO: 43068 - RNA, 21 nt, RNAi
uaacagaauuggcaaaugcuu

SEQ ID NO: 43069 - RNA, 21 nt, RNAi
uuauugucuuaaccguuuacg

SEQ ID NO: 43070 - DNA, 21 bp, Homo sapiens
tactgtcattcgaagagagtt

SEQ ID NO: 43071 - RNA, 21 nt, RNAi
cugucauucgaagagaguuuu

SEQ ID NO: 43072 - RNA, 21 nt, RNAi
uugacaguaagcuucucucaa

SEQ ID NO: 43073 - DNA, 21 bp, Homo sapiens
tattcatagagacattaagcc

SEQ ID NO: 43074 - RNA, 21 nt, RNAi
uucauagagacauuaagccuu

SEQ ID NO: 43075 - RNA, 21 nt, RNAi
uuaaguaucucuguaauucgg

SEQ ID NO: 43076 - DNA, 21 bp, Homo sapiens
tagagacattaagccagagaa

SEQ ID NO: 43077 - RNA, 21 nt, RNAi
gagacauuaagccagagaauu

SEQ ID NO: 43078 - RNA, 21 nt, RNAi
uucucuguaauucggucucuu

SEQ ID NO: 43079 - DNA, 21 bp, Homo sapiens
taagccagagaacttacttct

SEQ ID NO: 43080 - RNA, 21 nt, RNAi
agccagagaacuuacuucuuu

SEQ ID NO: 43081 - RNA, 21 nt, RNAi
uuucggucucuugaaugaaga

SEQ ID NO: 43082 - DNA, 21 bp, Homo sapiens
tacttcttggatcagctggag

SEQ ID NO: 43083 - RNA, 21 nt, RNAi
cuucuuggaucagcuggaguu

SEQ ID NO: 43084 - RNA, 21 nt, RNAi
uugaagaaccuagucgaccuc

SEQ ID NO: 43085 - DNA, 21 bp, Homo sapiens
tacatgctccatcttccagga

SEQ ID NO: 43086 - RNA, 21 nt, RNAi
caugcuccaucuuccaggauu

SEQ ID NO: 43087 - RNA, 21 nt, RNAi
uuguacgagguagaagguccu

SEQ ID NO: 43088 - DNA, 21 bp, Homo sapiens
tagcaaacagtcttaggaatc

SEQ ID NO: 43089 - RNA, 21 nt, RNAi
gcaaacagucuuaggaaucuu

SEQ ID NO: 43090 - RNA, 21 nt, RNAi
uucguuugucagaauccuuag

SEQ ID NO: 43091 - DNA, 21 bp, Homo sapiens
tataacctgacaggaacatgc

SEQ ID NO: 43092 - RNA, 21 nt, RNAi
uaaccugacaggaacaugcuu

SEQ ID NO: 43093 - RNA, 21 nt, RNAi
uuauuggacuguccuuguacg

SEQ ID NO: 43094 - DNA, 21 bp, Homo sapiens
taacctgacaggaacatgcta

SEQ ID NO: 43095 - RNA, 21 nt, RNAi
accugacaggaacaugcuauu

SEQ ID NO: 43096 - RNA, 21 nt, RNAi
uuuggacuguccuuguacgau

SEQ ID NO: 43097 - DNA, 21 bp, Homo sapiens
tagaacgctacacaagaaata

SEQ ID NO: 43098 - RNA, 21 nt, RNAi
gaacgcuacacaagaaauauu

SEQ ID NO: 43099 - RNA, 21 nt, RNAi
uucuugcgauguguucuuuau

SEQ ID NO: 43100 - DNA, 21 bp, Homo sapiens
tactcagcaggtgtgccttaa

SEQ ID NO: 43101 - RNA, 21 nt, RNAi
cucagcaggugugccuuaauu

SEQ ID NO: 43102 - RNA, 21 nt, RNAi
uugagucguccacacggaauu

SEQ ID NO: 43103 - DNA, 21 bp, Homo sapiens
tattcagaaagctccacatca

SEQ ID NO: 43104 - RNA, 21 nt, RNAi
uucagaaagcuccacaucauu

SEQ ID NO: 43105 - RNA, 21 nt, RNAi
uuaagucuuucgagguguagu

SEQ ID NO: 43106 - DNA, 21 bp, Homo sapiens
taaacatgacactctgaagtg

SEQ ID NO: 43107 - RNA, 21 nt, RNAi
aacaugacacucugaaguguu

SEQ ID NO: 43108 - RNA, 21 nt, RNAi
uuuuguacugugagacuucac

SEQ ID NO: 43109 - DNA, 21 bp, Homo sapiens
tagccacgagaattgtgctac

SEQ ID NO: 43110 - RNA, 21 nt, RNAi
gccacgagaauugugcuacuu

SEQ ID NO: 43111 - RNA, 21 nt, RNAi
uucggugcucuuaacacgaug

SEQ ID NO: 43112 - DNA, 21 bp, Homo sapiens
tatactggttcataatctgga

SEQ ID NO: 43113 - RNA, 21 nt, RNAi
uacugguucauaaucuggauu

SEQ ID NO: 43114 - RNA, 21 nt, RNAi
uuaugaccaaguauuagaccu

SEQ ID NO: 43115 - DNA, 21 bp, Homo sapiens
tactggttcataatctggagg

SEQ ID NO: 43116 - RNA, 21 nt, RNAi
cugguucauaaucuggagguu

SEQ ID NO: 43117 - RNA, 21 nt, RNAi
uugaccaaguauuagaccucc

SEQ ID NO: 43118 - DNA, 21 bp, Homo sapiens
taatctggaggcaaggttcga

SEQ ID NO: 43119 - RNA, 21 nt, RNAi
aucuggaggcaagguucgauu

SEQ ID NO: 43120 - RNA, 21 nt, RNAi
uuuagaccuccguuccaagcu

SEQ ID NO: 43121 - DNA, 21 bp, Homo sapiens
taggcatggtgtcttcacagg

SEQ ID NO: 43122 - RNA, 21 nt, RNAi
ggcauggugucuucacagguu

SEQ ID NO: 43123 - RNA, 21 nt, RNAi
uuccguaccacagaagugucc

SEQ ID NO: 43124 - DNA, 21 bp, Homo sapiens
taaggagctgtgcaataacct

SEQ ID NO: 43125 - RNA, 21 nt, RNAi
aggagcugugcaauaaccuuu

SEQ ID NO: 43126 - RNA, 21 nt, RNAi
uuuccucgacacguuauugga

SEQ ID NO: 43127 - DNA, 21 bp, Homo sapiens
taaccttcctagtacctgagt

SEQ ID NO: 43128 - RNA, 21 nt, RNAi
accuuccuaguaccugaguuu

SEQ ID NO: 43129 - RNA, 21 nt, RNAi
uuuggaaggaucauggacuca

SEQ ID NO: 43130 - DNA, 21 bp, Homo sapiens
tagtacctgagtgagtgtgta

SEQ ID NO: 43131 - RNA, 21 nt, RNAi
guaccugagugaguguguauu

SEQ ID NO: 43132 - RNA, 21 nt, RNAi
uucauggacucacucacacau

SEQ ID NO: 43133 - DNA, 21 bp, Homo sapiens
tacctgagtgagtgtgtaact

SEQ ID NO: 43134 - RNA, 21 nt, RNAi
ccugagugaguguguaacuuu

SEQ ID NO: 43135 - RNA, 21 nt, RNAi
uuggacucacucacacauuga

SEQ ID NO: 43136 - DNA, 21 bp, Homo sapiens
taaagctgttggaatgagtat

SEQ ID NO: 43137 - RNA, 21 nt, RNAi
aagcuguuggaaugaguauuu

SEQ ID NO: 43138 - RNA, 21 nt, RNAi
uuuucgacaaccuuacucaua

SEQ ID NO: 43139 - DNA, 21 bp, Homo sapiens
taggaatgctgtgtgtctgtc

SEQ ID NO: 43140 - RNA, 21 nt, RNAi
ggaaugcugugugucugucuu

SEQ ID NO: 43141 - RNA, 21 nt, RNAi
uuccuuacgacacacagacag

SEQ ID NO: 43142 - DNA, 21 bp, Homo sapiens
tagtcctccttaaccacttat

SEQ ID NO: 43143 - RNA, 21 nt, RNAi
guccuccuuaaccacuuauuu

SEQ ID NO: 43144 - RNA, 21 nt, RNAi
uucaggaggaauuggugaaua

SEQ ID NO: 43145 - DNA, 21 bp, Homo sapiens
taggaacacgtgctctacctc

SEQ ID NO: 43146 - RNA, 21 nt, RNAi
ggaacacgugcucuaccucuu

SEQ ID NO: 43147 - RNA, 21 nt, RNAi
uuccuugugcacgagauggag

SEQ ID NO: 43148 - DNA, 21 bp, Homo sapiens
tacagaagaggccatgtgtct

SEQ ID NO: 43149 - RNA, 21 nt, RNAi
cagaagaggccaugugucuuu

SEQ ID NO: 43150 - RNA, 21 nt, RNAi
uugucuucuccgguacacaga

SEQ ID NO: 43151 - DNA, 21 bp, Homo sapiens
aagactttgaaattggtcgcc

SEQ ID NO: 43152 - RNA, 21 nt, RNAi
gacuuugaaauuggucgccuu

SEQ ID NO: 43153 - RNA, 21 nt, RNAi
uucugaaacuuuaaccagcgg

SEQ ID NO: 43154 - DNA, 21 bp, Homo sapiens
aagccagagaacttacttctt

SEQ ID NO: 43155 - RNA, 21 nt, RNAi
gccagagaacuuacuucuuuu

SEQ ID NO: 43156 - RNA, 21 nt, RNAi
uucggucucuugaaugaagaa

SEQ ID NO: 43157 - DNA, 21 bp, Homo sapiens
aaatgattgaaggtcggatgc

SEQ ID NO: 43158 - RNA, 21 nt, RNAi
augauugaaggucggaugcuu

SEQ ID NO: 43159 - RNA, 21 nt, RNAi
uuuacuaacuuccagccuacg

SEQ ID NO: 43160 - DNA, 21 bp, Homo sapiens
aatgattgaaggtcggatgca

SEQ ID NO: 43161 - RNA, 21 nt, RNAi
ugauugaaggucggaugcauu

SEQ ID NO: 43162 - RNA, 21 nt, RNAi
uuacuaacuuccagccuacgu

SEQ ID NO: 43163 - DNA, 21 bp, Homo sapiens
aaggtcggatgcatgatgaga

SEQ ID NO: 43164 - RNA, 21 nt, RNAi
ggucggaugcaugaugagauu

SEQ ID NO: 43165 - RNA, 21 nt, RNAi
uuccagccuacguacuacucu

SEQ ID NO: 43166 - DNA, 21 bp, Homo sapiens
aacacataccaagagacctac

SEQ ID NO: 43167 - RNA, 21 nt, RNAi
cacauaccaagagaccuacuu

SEQ ID NO: 43168 - RNA, 21 nt, RNAi
uuguguaugguucucuggaug

SEQ ID NO: 43169 - DNA, 21 bp, Homo sapiens
aagactgttgaagcataatcc

SEQ ID NO: 43170 - RNA, 21 nt, RNAi
gacuguugaagcauaauccuu

SEQ ID NO: 43171 - RNA, 21 nt, RNAi
uucugacaacuucguauuagg

SEQ ID NO: 43172 - DNA, 21 bp, Homo sapiens
cagtcacaagccggttcagaa

SEQ ID NO: 43173 - RNA, 21 nt, RNAi
gucacaagccgguucagaauu

SEQ ID NO: 43174 - RNA, 21 nt, RNAi
uucaguguucggccaagucuu

SEQ ID NO: 43175 - DNA, 21 bp, Homo sapiens
caggcaaccagtgtacctcat

SEQ ID NO: 43176 - RNA, 21 nt, RNAi
ggcaaccaguguaccucauuu

SEQ ID NO: 43177 - RNA, 21 nt, RNAi
uuccguuggucacauggagua

SEQ ID NO: 43178 - DNA, 21 bp, Homo sapiens
caccttcggcatcctaatatt

SEQ ID NO: 43179 - RNA, 21 nt, RNAi
ccuucggcauccuaauauuuu

SEQ ID NO: 43180 - RNA, 21 nt, RNAi
uuggaagccguaggauuauaa

SEQ ID NO: 43181 - DNA, 21 bp, Homo sapiens
caccacttggaacagtttata

SEQ ID NO: 43182 - RNA, 21 nt, RNAi
ccacuuggaacaguuuauauu

SEQ ID NO: 43183 - RNA, 21 nt, RNAi
uuggugaaccuugucaaauau

SEQ ID NO: 43184 - DNA, 21 bp, Homo sapiens
cacttggaacagtttatagag

SEQ ID NO: 43185 - RNA, 21 nt, RNAi
cuuggaacaguuuauagaguu

SEQ ID NO: 43186 - RNA, 21 nt, RNAi
uugaaccuugucaaauaucuc

SEQ ID NO: 43187 - DNA, 21 bp, Homo sapiens
cagagaacttacttcttggat

SEQ ID NO: 43188 - RNA, 21 nt, RNAi
gagaacuuacuucuuggauuu

SEQ ID NO: 43189 - RNA, 21 nt, RNAi
uucucuugaaugaagaaccua

SEQ ID NO: 43190 - DNA, 21 bp, Homo sapiens
cagtacatgctccatcttcca

SEQ ID NO: 43191 - RNA, 21 nt, RNAi
guacaugcuccaucuuccauu

SEQ ID NO: 43192 - RNA, 21 nt, RNAi
uucauguacgagguagaaggu

SEQ ID NO: 43193 - DNA, 21 bp, Homo sapiens
cacataccaagagacctacaa

SEQ ID NO: 43194 - RNA, 21 nt, RNAi
cauaccaagagaccuacaauu

SEQ ID NO: 43195 - RNA, 21 nt, RNAi
uuguaugguucucuggauguu

SEQ ID NO: 43196 - DNA, 21 bp, Homo sapiens
gaaatgattgaaggtcggatg

SEQ ID NO: 43197 - RNA, 21 nt, RNAi
aaugauugaaggucggauguu

SEQ ID NO: 43198 - RNA, 21 nt, RNAi
uuuuacuaacuuccagccuac

SEQ ID NO: 43199 - DNA, 21 bp, Homo sapiens
gattgaaggtcggatgcatga

SEQ ID NO: 43200 - RNA, 21 nt, RNAi
uugaaggucggaugcaugauu

SEQ ID NO: 43201 - RNA, 21 nt, RNAi
uuaacuuccagccuacguacu

SEQ ID NO: 43202 - DNA, 21 bp, Homo sapiens
gaaggtcggatgcatgatgag

SEQ ID NO: 43203 - RNA, 21 nt, RNAi
aggucggaugcaugaugaguu

SEQ ID NO: 43204 - RNA, 21 nt, RNAi
uuuccagccuacguacuacuc

SEQ ID NO: 43205 - DNA, 21 bp, Homo sapiens
gaggcaaacacataccaagag

SEQ ID NO: 43206 - RNA, 21 nt, RNAi
ggcaaacacauaccaagaguu

SEQ ID NO: 43207 - RNA, 21 nt, RNAi
uuccguuuguguaugguucuc

SEQ ID NO: 43208 - DNA, 21 bp, Homo sapiens
tacctgtaaatagtggccagg

SEQ ID NO: 43209 - RNA, 21 nt, RNAi
ccuguaaauaguggccagguu

SEQ ID NO: 43210 - RNA, 21 nt, RNAi
uuggacauuuaucaccggucc

SEQ ID NO: 43211 - DNA, 21 bp, Homo sapiens
tatttaaagctcagctggaga

SEQ ID NO: 43212 - RNA, 21 nt, RNAi
uuuaaagcucagcuggagauu

SEQ ID NO: 43213 - RNA, 21 nt, RNAi
uuaaauuucgagucgaccucu

SEQ ID NO: 43214 - DNA, 21 bp, Homo sapiens
tagactgtatggttatttcca

SEQ ID NO: 43215 - RNA, 21 nt, RNAi
gacuguaugguuauuuccauu

SEQ ID NO: 43216 - RNA, 21 nt, RNAi
uucugacauaccaauaaaggu

SEQ ID NO: 43217 - DNA, 21 bp, Homo sapiens
taccagagtctacctaattct

SEQ ID NO: 43218 - RNA, 21 nt, RNAi
ccagagucuaccuaauucuuu

SEQ ID NO: 43219 - RNA, 21 nt, RNAi
uuggucucagauggauuaaga

SEQ ID NO: 43220 - DNA, 21 bp, Homo sapiens
tattcatagagacattaagcc

SEQ ID NO: 43221 - RNA, 21 nt, RNAi
uucauagagacauuaagccuu

SEQ ID NO: 43222 - RNA, 21 nt, RNAi
uuaaguaucucuguaauucgg

SEQ ID NO: 43223 - DNA, 21 bp, Homo sapiens
aaggtgatggagaatagcagt

SEQ ID NO: 43224 - RNA, 21 nt, RNAi
ggugauggagaauagcaguuu

SEQ ID NO: 43225 - RNA, 21 nt, RNAi
uuccacuaccucuuaucguca

SEQ ID NO: 43226 - DNA, 21 bp, Homo sapiens
aacgcggcacttcacaattga

SEQ ID NO: 43227 - RNA, 21 nt, RNAi
cgcggcacuucacaauugauu

SEQ ID NO: 43228 - RNA, 21 nt, RNAi
uugcgccgugaaguguuaacu

SEQ ID NO: 43229 - DNA, 21 bp, Homo sapiens
aattgatgactttgagattgg

SEQ ID NO: 43230 - RNA, 21 nt, RNAi
uugaugacuuugagauugguu

SEQ ID NO: 43231 - RNA, 21 nt, RNAi
uuaacuacugaaacucuaacc

SEQ ID NO: 43232 - DNA, 21 bp, Homo sapiens
aaaggcaagtttggaaacgtg

SEQ ID NO: 43233 - RNA, 21 nt, RNAi
aggcaaguuuggaaacguguu

SEQ ID NO: 43234 - RNA, 21 nt, RNAi
uuuccguucaaaccuuugcac

SEQ ID NO: 43235 - DNA, 21 bp, Homo sapiens
aaggcaagtttggaaacgtgt

SEQ ID NO: 43236 - RNA, 21 nt, RNAi
ggcaaguuuggaaacguguuu

SEQ ID NO: 43237 - RNA, 21 nt, RNAi
uuccguucaaaccuuugcaca

SEQ ID NO: 43238 - DNA, 21 bp, Homo sapiens
aagtttggaaacgtgtacttg

SEQ ID NO: 43239 - RNA, 21 nt, RNAi
guuuggaaacguguacuuguu

SEQ ID NO: 43240 - RNA, 21 nt, RNAi
uucaaaccuuugcacaugaac

SEQ ID NO: 43241 - DNA, 21 bp, Homo sapiens
aaagccatttcatcgtggcgc

SEQ ID NO: 43242 - RNA, 21 nt, RNAi
agccauuucaucguggcgcuu

SEQ ID NO: 43243 - RNA, 21 nt, RNAi
uuucgguaaaguagcaccgcg

SEQ ID NO: 43244 - DNA, 21 bp, Homo sapiens
aagccatttcatcgtggcgct

SEQ ID NO: 43245 - RNA, 21 nt, RNAi
gccauuucaucguggcgcuuu

SEQ ID NO: 43246 - RNA, 21 nt, RNAi
uucgguaaaguagcaccgcga

SEQ ID NO: 43247 - DNA, 21 bp, Homo sapiens
aacatcctgcgtctctacaac

SEQ ID NO: 43248 - RNA, 21 nt, RNAi
cauccugcgucucuacaacuu

SEQ ID NO: 43249 - RNA, 21 nt, RNAi
uuguaggacgcagagauguug

SEQ ID NO: 43250 - DNA, 21 bp, Homo sapiens
aaggagctgcagaagagctgc

SEQ ID NO: 43251 - RNA, 21 nt, RNAi
ggagcugcagaagagcugcuu

SEQ ID NO: 43252 - RNA, 21 nt, RNAi
uuccucgacgucuucucgacg

SEQ ID NO: 43253 - DNA, 21 bp, Homo sapiens
aagagctgcacatttgacgag

SEQ ID NO: 43254 - RNA, 21 nt, RNAi
gagcugcacauuugacgaguu

SEQ ID NO: 43255 - RNA, 21 nt, RNAi
uucucgacguguaaacugcuc

SEQ ID NO: 43256 - DNA, 21 bp, Homo sapiens
aacagccacgatcatggagga

SEQ ID NO: 43257 - RNA, 21 nt, RNAi
cagccacgaucauggaggauu

SEQ ID NO: 43258 - RNA, 21 nt, RNAi
uugucggugcuaguaccuccu

SEQ ID NO: 43259 - DNA, 21 bp, Homo sapiens
aagaaggtgattcacagagac

SEQ ID NO: 43260 - RNA, 21 nt, RNAi
gaaggugauucacagagacuu

SEQ ID NO: 43261 - RNA, 21 nt, RNAi
uucuuccacuaagugucucug

SEQ ID NO: 43262 - DNA, 21 bp, Homo sapiens
aaggtgattcacagagacata

SEQ ID NO: 43263 - RNA, 21 nt, RNAi
ggugauucacagagacauauu

SEQ ID NO: 43264 - RNA, 21 nt, RNAi
uuccacuaagugucucuguau

SEQ ID NO: 43265 - DNA, 21 bp, Homo sapiens
aagattgctgacttcggctgg

SEQ ID NO: 43266 - RNA, 21 nt, RNAi
gauugcugacuucggcugguu

SEQ ID NO: 43267 - RNA, 21 nt, RNAi
uucuaacgacugaagccgacc

SEQ ID NO: 43268 - DNA, 21 bp, Homo sapiens
aatgagaaggtggatctgtgg

SEQ ID NO: 43269 - RNA, 21 nt, RNAi
ugagaagguggaucugugguu

SEQ ID NO: 43270 - RNA, 21 nt, RNAi
uuacucuuccaccuagacacc

SEQ ID NO: 43271 - DNA, 21 bp, Homo sapiens
aaggtggatctgtggtgcatt

SEQ ID NO: 43272 - RNA, 21 nt, RNAi
gguggaucuguggugcauuuu

SEQ ID NO: 43273 - RNA, 21 nt, RNAi
uuccaccuagacaccacguaa

SEQ ID NO: 43274 - DNA, 21 bp, Homo sapiens
aacgagacctatcgccgcatc

SEQ ID NO: 43275 - RNA, 21 nt, RNAi
cgagaccuaucgccgcaucuu

SEQ ID NO: 43276 - RNA, 21 nt, RNAi
uugcucuggauagcggcguag

SEQ ID NO: 43277 - DNA, 21 bp, Homo sapiens
cagcgagtcctccggaaagag

SEQ ID NO: 43278 - RNA, 21 nt, RNAi
gcgaguccuccggaaagaguu

SEQ ID NO: 43279 - RNA, 21 nt, RNAi
uucgcucaggaggccuuucuc

SEQ ID NO: 43280 - DNA, 21 bp, Homo sapiens
catctgcacttgtcctcatga

SEQ ID NO: 43281 - RNA, 21 nt, RNAi
ucugcacuuguccucaugauu

SEQ ID NO: 43282 - RNA, 21 nt, RNAi
uuagacgugaacaggaguacu

SEQ ID NO: 43283 - DNA, 21 bp, Homo sapiens
cacttgtcctcatgagccgct

SEQ ID NO: 43284 - RNA, 21 nt, RNAi
cuuguccucaugagccgcuuu

SEQ ID NO: 43285 - RNA, 21 nt, RNAi
uugaacaggaguacucggcga

SEQ ID NO: 43286 - DNA, 21 bp, Homo sapiens
catgagccgctccaatgtcca

SEQ ID NO: 43287 - RNA, 21 nt, RNAi
ugagccgcuccaauguccauu

SEQ ID NO: 43288 - RNA, 21 nt, RNAi
uuacucggcgagguuacaggu

SEQ ID NO: 43289 - DNA, 21 bp, Homo sapiens
cagaaggtgatggagaatagc

SEQ ID NO: 43290 - RNA, 21 nt, RNAi
gaaggugauggagaauagcuu

SEQ ID NO: 43291 - RNA, 21 nt, RNAi
uucuuccacuaccucuuaucg

SEQ ID NO: 43292 - DNA, 21 bp, Homo sapiens
catcttaacgcggcacttcac

SEQ ID NO: 43293 - RNA, 21 nt, RNAi
ucuuaacgcggcacuucacuu

SEQ ID NO: 43294 - RNA, 21 nt, RNAi
uuagaauugcgccgugaagug

SEQ ID NO: 43295 - DNA, 21 bp, Homo sapiens
cacttcacaattgatgacttt

SEQ ID NO: 43296 - RNA, 21 nt, RNAi
cuucacaauugaugacuuuuu

SEQ ID NO: 43297 - RNA, 21 nt, RNAi
uugaaguguuaacuacugaaa

SEQ ID NO: 43298 - DNA, 21 bp, Homo sapiens
cacaattgatgactttgagat

SEQ ID NO: 43299 - RNA, 21 nt, RNAi
caauugaugacuuugagauuu

SEQ ID NO: 43300 - RNA, 21 nt, RNAi
uuguuaacuacugaaacucua

SEQ ID NO: 43301 - DNA, 21 bp, Homo sapiens
caattgatgactttgagattg

SEQ ID NO: 43302 - RNA, 21 nt, RNAi
auugaugacuuugagauuguu

SEQ ID NO: 43303 - RNA, 21 nt, RNAi
uuuaacuacugaaacucuaac

SEQ ID NO: 43304 - DNA, 21 bp, Homo sapiens
caaaggcaagtttggaaacgt

SEQ ID NO: 43305 - RNA, 21 nt, RNAi
aaggcaaguuuggaaacguuu

SEQ ID NO: 43306 - RNA, 21 nt, RNAi
uuuuccguucaaaccuuugca

SEQ ID NO: 43307 - DNA, 21 bp, Homo sapiens
caagtttggaaacgtgtactt

SEQ ID NO: 43308 - RNA, 21 nt, RNAi
aguuuggaaacguguacuuuu

SEQ ID NO: 43309 - RNA, 21 nt, RNAi
uuucaaaccuuugcacaugaa

SEQ ID NO: 43310 - DNA, 21 bp, Homo sapiens
catttcatcgtggcgctcaag

SEQ ID NO: 43311 - RNA, 21 nt, RNAi
uuucaucguggcgcucaaguu

SEQ ID NO: 43312 - RNA, 21 nt, RNAi
uuaaaguagcaccgcgaguuc

SEQ ID NO: 43313 - DNA, 21 bp, Homo sapiens
catcgtggcgctcaaggtcct

SEQ ID NO: 43314 - RNA, 21 nt, RNAi
ucguggcgcucaagguccuuu

SEQ ID NO: 43315 - RNA, 21 nt, RNAi
uuagcaccgcgaguuccagga

SEQ ID NO: 43316 - DNA, 21 bp, Homo sapiens
catcagctgcgcagagagatc

SEQ ID NO: 43317 - RNA, 21 nt, RNAi
ucagcugcgcagagagaucuu

SEQ ID NO: 43318 - RNA, 21 nt, RNAi
uuagucgacgcgucucucuag

SEQ ID NO: 43319 - DNA, 21 bp, Homo sapiens
cagctgcgcagagagatcgaa

SEQ ID NO: 43320 - RNA, 21 nt, RNAi
gcugcgcagagagaucgaauu

SEQ ID NO: 43321 - RNA, 21 nt, RNAi
uucgacgcgucucucuagcuu

SEQ ID NO: 43322 - DNA, 21 bp, Homo sapiens
cagagagatcgaaatccaggc

SEQ ID NO: 43323 - RNA, 21 nt, RNAi
gagagaucgaaauccaggcuu

SEQ ID NO: 43324 - RNA, 21 nt, RNAi
uucucucuagcuuuagguccg

SEQ ID NO: 43325 - DNA, 21 bp, Homo sapiens
caacatcctgcgtctctacaa

SEQ ID NO: 43326 - RNA, 21 nt, RNAi
acauccugcgucucuacaauu

SEQ ID NO: 43327 - RNA, 21 nt, RNAi
uuuguaggacgcagagauguu

SEQ ID NO: 43328 - DNA, 21 bp, Homo sapiens
catcctgcgtctctacaacta

SEQ ID NO: 43329 - RNA, 21 nt, RNAi
uccugcgucucuacaacuauu

SEQ ID NO: 43330 - RNA, 21 nt, RNAi
uuaggacgcagagauguugau

SEQ ID NO: 43331 - DNA, 21 bp, Homo sapiens
caaggagctgcagaagagctg

SEQ ID NO: 43332 - RNA, 21 nt, RNAi
aggagcugcagaagagcuguu

SEQ ID NO: 43333 - RNA, 21 nt, RNAi
uuuccucgacgucuucucgac

SEQ ID NO: 43334 - DNA, 21 bp, Homo sapiens
cagaagagctgcacatttgac

SEQ ID NO: 43335 - RNA, 21 nt, RNAi
gaagagcugcacauuugacuu

SEQ ID NO: 43336 - RNA, 21 nt, RNAi
uucuucucgacguguaaacug

SEQ ID NO: 43337 - DNA, 21 bp, Homo sapiens
cacatttgacgagcagcgaac

SEQ ID NO: 43338 - RNA, 21 nt, RNAi
cauuugacgagcagcgaacuu

SEQ ID NO: 43339 - RNA, 21 nt, RNAi
uuguaaacugcucgucgcuug

SEQ ID NO: 43340 - DNA, 21 bp, Homo sapiens
catttgacgagcagcgaacag

SEQ ID NO: 43341 - RNA, 21 nt, RNAi
uuugacgagcagcgaacaguu

SEQ ID NO: 43342 - RNA, 21 nt, RNAi
uuaaacugcucgucgcuuguc

SEQ ID NO: 43343 - DNA, 21 bp, Homo sapiens
cagcgaacagccacgatcatg

SEQ ID NO: 43344 - RNA, 21 nt, RNAi
gcgaacagccacgaucauguu

SEQ ID NO: 43345 - RNA, 21 nt, RNAi
uucgcuugucggugcuaguac

SEQ ID NO: 43346 - DNA, 21 bp, Homo sapiens
cagccacgatcatggaggagt

SEQ ID NO: 43347 - RNA, 21 nt, RNAi
gccacgaucauggaggaguuu

SEQ ID NO: 43348 - RNA, 21 nt, RNAi
uucggugcuaguaccuccuca

SEQ ID NO: 43349 - DNA, 21 bp, Homo sapiens
cacgatcatggaggagttggc

SEQ ID NO: 43350 - RNA, 21 nt, RNAi
cgaucauggaggaguuggcuu

SEQ ID NO: 43351 - RNA, 21 nt, RNAi
uugcuaguaccuccucaaccg

SEQ ID NO: 43352 - DNA, 21 bp, Homo sapiens
catggaggagttggcagatgc

SEQ ID NO: 43353 - RNA, 21 nt, RNAi
uggaggaguuggcagaugcuu

SEQ ID NO: 43354 - RNA, 21 nt, RNAi
uuaccuccucaaccgucuacg

SEQ ID NO: 43355 - DNA, 21 bp, Homo sapiens
cagatgctctaatgtactgcc

SEQ ID NO: 43356 - RNA, 21 nt, RNAi
gaugcucuaauguacugccuu

SEQ ID NO: 43357 - RNA, 21 nt, RNAi
uucuacgagauuacaugacgg

SEQ ID NO: 43358 - DNA, 21 bp, Homo sapiens
cacagagacataaagccagaa

SEQ ID NO: 43359 - RNA, 21 nt, RNAi
cagagacauaaagccagaauu

SEQ ID NO: 43360 - RNA, 21 nt, RNAi
uugucucuguauuucggucuu

SEQ ID NO: 43361 - DNA, 21 bp, Homo sapiens
catgcacaatgagaaggtgga

SEQ ID NO: 43362 - RNA, 21 nt, RNAi
ugcacaaugagaagguggauu

SEQ ID NO: 43363 - RNA, 21 nt, RNAi
uuacguguuacucuuccaccu

SEQ ID NO: 43364 - DNA, 21 bp, Homo sapiens
cacaatgagaaggtggatctg

SEQ ID NO: 43365 - RNA, 21 nt, RNAi
caaugagaagguggaucuguu

SEQ ID NO: 43366 - RNA, 21 nt, RNAi
uuguuacucuuccaccuagac

SEQ ID NO: 43367 - DNA, 21 bp, Homo sapiens
caatgagaaggtggatctgtg

SEQ ID NO: 43368 - RNA, 21 nt, RNAi
augagaagguggaucuguguu

SEQ ID NO: 43369 - RNA, 21 nt, RNAi
uuuacucuuccaccuagacac

SEQ ID NO: 43370 - DNA, 21 bp, Homo sapiens
cattggagtgctttgctatga

SEQ ID NO: 43371 - RNA, 21 nt, RNAi
uuggagugcuuugcuaugauu

SEQ ID NO: 43372 - RNA, 21 nt, RNAi
uuaaccucacgaaacgauacu

SEQ ID NO: 43373 - DNA, 21 bp, Homo sapiens
catcacacaacgagacctatc

SEQ ID NO: 43374 - RNA, 21 nt, RNAi
ucacacaacgagaccuaucuu

SEQ ID NO: 43375 - RNA, 21 nt, RNAi
uuaguguguugcucuggauag

SEQ ID NO: 43376 - DNA, 21 bp, Homo sapiens
cacacaacgagacctatcgcc

SEQ ID NO: 43377 - RNA, 21 nt, RNAi
cacaacgagaccuaucgccuu

SEQ ID NO: 43378 - RNA, 21 nt, RNAi
uuguguugcucuggauagcgg

SEQ ID NO: 43379 - DNA, 21 bp, Homo sapiens
cacaacgagacctatcgccgc

SEQ ID NO: 43380 - RNA, 21 nt, RNAi
caacgagaccuaucgccgcuu

SEQ ID NO: 43381 - RNA, 21 nt, RNAi
uuguugcucuggauagcggcg

SEQ ID NO: 43382 - DNA, 21 bp, Homo sapiens
caacgagacctatcgccgcat

SEQ ID NO: 43383 - RNA, 21 nt, RNAi
acgagaccuaucgccgcauuu

SEQ ID NO: 43384 - RNA, 21 nt, RNAi
uuugcucuggauagcggcgua

SEQ ID NO: 43385 - DNA, 21 bp, Homo sapiens
catcgtcaaggtggacctaaa

SEQ ID NO: 43386 - RNA, 21 nt, RNAi
ucgucaagguggaccuaaauu

SEQ ID NO: 43387 - RNA, 21 nt, RNAi
uuagcaguuccaccuggauuu

SEQ ID NO: 43388 - DNA, 21 bp, Homo sapiens
caggacctcatctccaaactg

SEQ ID NO: 43389 - RNA, 21 nt, RNAi
ggaccucaucuccaaacuguu

SEQ ID NO: 43390 - RNA, 21 nt, RNAi
uuccuggaguagagguuugac

SEQ ID NO: 43391 - DNA, 21 bp, Homo sapiens
catctccaaactgctcaggca

SEQ ID NO: 43392 - RNA, 21 nt, RNAi
ucuccaaacugcucaggcauu

SEQ ID NO: 43393 - RNA, 21 nt, RNAi
uuagagguuugacgaguccgu

SEQ ID NO: 43394 - DNA, 21 bp, Homo sapiens
caatctgtcgcctgatggtcc

SEQ ID NO: 43395 - RNA, 21 nt, RNAi
aucugucgccugaugguccuu

SEQ ID NO: 43396 - RNA, 21 nt, RNAi
uuuagacagcggacuaccagg

SEQ ID NO: 43397 - DNA, 21 bp, Homo sapiens
gagagtagcagtgccttggac

SEQ ID NO: 43398 - RNA, 21 nt, RNAi
gaguagcagugccuuggacuu

SEQ ID NO: 43399 - RNA, 21 nt, RNAi
uucucaucgucacggaaccug

SEQ ID NO: 43400 - DNA, 21 bp, Homo sapiens
gagtcctccggaaagagcctg

SEQ ID NO: 43401 - RNA, 21 nt, RNAi
guccuccggaaagagccuguu

SEQ ID NO: 43402 - RNA, 21 nt, RNAi
uucaggaggccuuucucggac

SEQ ID NO: 43403 - DNA, 21 bp, Homo sapiens
gaaggtgatggagaatagcag

SEQ ID NO: 43404 - RNA, 21 nt, RNAi
aggugauggagaauagcaguu

SEQ ID NO: 43405 - RNA, 21 nt, RNAi
uuuccacuaccucuuaucguc

SEQ ID NO: 43406 - DNA, 21 bp, Homo sapiens
gacatcttaacgcggcacttc

SEQ ID NO: 43407 - RNA, 21 nt, RNAi
caucuuaacgcggcacuucuu

SEQ ID NO: 43408 - RNA, 21 nt, RNAi
uuguagaauugcgccgugaag

SEQ ID NO: 43409 - DNA, 21 bp, Homo sapiens
gagcatcagctgcgcagagag

SEQ ID NO: 43410 - RNA, 21 nt, RNAi
gcaucagcugcgcagagaguu

SEQ ID NO: 43411 - RNA, 21 nt, RNAi
uucguagucgacgcgucucuc

SEQ ID NO: 43412 - DNA, 21 bp, Homo sapiens
gaccggaggaggatctacttg

SEQ ID NO: 43413 - RNA, 21 nt, RNAi
ccggaggaggaucuacuuguu

SEQ ID NO: 43414 - RNA, 21 nt, RNAi
uuggccuccuccuagaugaac

SEQ ID NO: 43415 - DNA, 21 bp, Homo sapiens
gaggaggatctacttgattct

SEQ ID NO: 43416 - RNA, 21 nt, RNAi
ggaggaucuacuugauucuuu

SEQ ID NO: 43417 - RNA, 21 nt, RNAi
uuccuccuagaugaacuaaga

SEQ ID NO: 43418 - DNA, 21 bp, Homo sapiens
gaggatctacttgattctaga

SEQ ID NO: 43419 - RNA, 21 nt, RNAi
ggaucuacuugauucuagauu

SEQ ID NO: 43420 - RNA, 21 nt, RNAi
uuccuagaugaacuaagaucu

SEQ ID NO: 43421 - DNA, 21 bp, Homo sapiens
gatctacttgattctagagta

SEQ ID NO: 43422 - RNA, 21 nt, RNAi
ucuacuugauucuagaguauu

SEQ ID NO: 43423 - RNA, 21 nt, RNAi
uuagaugaacuaagaucucau

SEQ ID NO: 43424 - DNA, 21 bp, Homo sapiens
gagctctacaaggagctgcag

SEQ ID NO: 43425 - RNA, 21 nt, RNAi
gcucuacaaggagcugcaguu

SEQ ID NO: 43426 - RNA, 21 nt, RNAi
uucgagauguuccucgacguc

SEQ ID NO: 43427 - DNA, 21 bp, Homo sapiens
gagctgcagaagagctgcaca

SEQ ID NO: 43428 - RNA, 21 nt, RNAi
gcugcagaagagcugcacauu

SEQ ID NO: 43429 - RNA, 21 nt, RNAi
uucgacgucuucucgacgugu

SEQ ID NO: 43430 - DNA, 21 bp, Homo sapiens
gaagagctgcacatttgacga

SEQ ID NO: 43431 - RNA, 21 nt, RNAi
agagcugcacauuugacgauu

SEQ ID NO: 43432 - RNA, 21 nt, RNAi
uuucucgacguguaaacugcu

SEQ ID NO: 43433 - DNA, 21 bp, Homo sapiens
gagctgcacatttgacgagca

SEQ ID NO: 43434 - RNA, 21 nt, RNAi
gcugcacauuugacgagcauu

SEQ ID NO: 43435 - RNA, 21 nt, RNAi
uucgacguguaaacugcucgu

SEQ ID NO: 43436 - DNA, 21 bp, Homo sapiens
gagcagcgaacagccacgatc

SEQ ID NO: 43437 - RNA, 21 nt, RNAi
gcagcgaacagccacgaucuu

SEQ ID NO: 43438 - RNA, 21 nt, RNAi
uucgucgcuugucggugcuag

SEQ ID NO: 43439 - DNA, 21 bp, Homo sapiens
gaacagccacgatcatggagg

SEQ ID NO: 43440 - RNA, 21 nt, RNAi
acagccacgaucauggagguu

SEQ ID NO: 43441 - RNA, 21 nt, RNAi
uuugucggugcuaguaccucc

SEQ ID NO: 43442 - DNA, 21 bp, Homo sapiens
gatcatggaggagttggcaga

SEQ ID NO: 43443 - RNA, 21 nt, RNAi
ucauggaggaguuggcagauu

SEQ ID NO: 43444 - RNA, 21 nt, RNAi
uuaguaccuccucaaccgucu

SEQ ID NO: 43445 - DNA, 21 bp, Homo sapiens
gaggagttggcagatgctcta

SEQ ID NO: 43446 - RNA, 21 nt, RNAi
ggaguuggcagaugcucuauu

SEQ ID NO: 43447 - RNA, 21 nt, RNAi
uuccucaaccgucuacgagau

SEQ ID NO: 43448 - DNA, 21 bp, Homo sapiens
gagttggcagatgctctaatg

SEQ ID NO: 43449 - RNA, 21 nt, RNAi
guuggcagaugcucuaauguu

SEQ ID NO: 43450 - RNA, 21 nt, RNAi
uucaaccgucuacgagauuac

SEQ ID NO: 43451 - DNA, 21 bp, Homo sapiens
gatgctctaatgtactgccat

SEQ ID NO: 43452 - RNA, 21 nt, RNAi
ugcucuaauguacugccauuu

SEQ ID NO: 43453 - RNA, 21 nt, RNAi
uuacgagauuacaugacggua

SEQ ID NO: 43454 - DNA, 21 bp, Homo sapiens
gaagaaggtgattcacagaga

SEQ ID NO: 43455 - RNA, 21 nt, RNAi
agaaggugauucacagagauu

SEQ ID NO: 43456 - RNA, 21 nt, RNAi
uuucuuccacuaagugucucu

SEQ ID NO: 43457 - DNA, 21 bp, Homo sapiens
gaaggtgattcacagagacat

SEQ ID NO: 43458 - RNA, 21 nt, RNAi
aggugauucacagagacauuu

SEQ ID NO: 43459 - RNA, 21 nt, RNAi
uuuccacuaagugucucugua

SEQ ID NO: 43460 - DNA, 21 bp, Homo sapiens
gattcacagagacataaagcc

SEQ ID NO: 43461 - RNA, 21 nt, RNAi
uucacagagacauaaagccuu

SEQ ID NO: 43462 - RNA, 21 nt, RNAi
uuaagugucucuguauuucgg

SEQ ID NO: 43463 - DNA, 21 bp, Homo sapiens
gagagctgaagattgctgact

SEQ ID NO: 43464 - RNA, 21 nt, RNAi
gagcugaagauugcugacuuu

SEQ ID NO: 43465 - RNA, 21 nt, RNAi
uucucgacuucuaacgacuga

SEQ ID NO: 43466 - DNA, 21 bp, Homo sapiens
gagctgaagattgctgacttc

SEQ ID NO: 43467 - RNA, 21 nt, RNAi
gcugaagauugcugacuucuu

SEQ ID NO: 43468 - RNA, 21 nt, RNAi
uucgacuucuaacgacugaag

SEQ ID NO: 43469 - DNA, 21 bp, Homo sapiens
gaagattgctgacttcggctg

SEQ ID NO: 43470 - RNA, 21 nt, RNAi
agauugcugacuucggcuguu

SEQ ID NO: 43471 - RNA, 21 nt, RNAi
uuucuaacgacugaagccgac

SEQ ID NO: 43472 - DNA, 21 bp, Homo sapiens
gattgctgacttcggctggtc

SEQ ID NO: 43473 - RNA, 21 nt, RNAi
uugcugacuucggcuggucuu

SEQ ID NO: 43474 - RNA, 21 nt, RNAi
uuaacgacugaagccgaccag

SEQ ID NO: 43475 - DNA, 21 bp, Homo sapiens
gacttcggctggtctgtgcat

SEQ ID NO: 43476 - RNA, 21 nt, RNAi
cuucggcuggucugugcauuu

SEQ ID NO: 43477 - RNA, 21 nt, RNAi
uugaagccgaccagacacgua

SEQ ID NO: 43478 - DNA, 21 bp, Homo sapiens
gaggaggaagacaatgtgtgg

SEQ ID NO: 43479 - RNA, 21 nt, RNAi
ggaggaagacaaugugugguu

SEQ ID NO: 43480 - RNA, 21 nt, RNAi
uuccuccuucuguuacacacc

SEQ ID NO: 43481 - DNA, 21 bp, Homo sapiens
gaggaagacaatgtgtggcac

SEQ ID NO: 43482 - RNA, 21 nt, RNAi
ggaagacaauguguggcacuu

SEQ ID NO: 43483 - RNA, 21 nt, RNAi
uuccuucuguuacacaccgug

SEQ ID NO: 43484 - DNA, 21 bp, Homo sapiens
gagaaggtggatctgtggtgc

SEQ ID NO: 43485 - RNA, 21 nt, RNAi
gaagguggaucuguggugcuu

SEQ ID NO: 43486 - RNA, 21 nt, RNAi
uucuuccaccuagacaccacg

SEQ ID NO: 43487 - DNA, 21 bp, Homo sapiens
gaaggtggatctgtggtgcat

SEQ ID NO: 43488 - RNA, 21 nt, RNAi
agguggaucuguggugcauuu

SEQ ID NO: 43489 - RNA, 21 nt, RNAi
uuuccaccuagacaccacgua

SEQ ID NO: 43490 - DNA, 21 bp, Homo sapiens
gatctgtggtgcattggagtg

SEQ ID NO: 43491 - RNA, 21 nt, RNAi
ucuguggugcauuggaguguu

SEQ ID NO: 43492 - RNA, 21 nt, RNAi
uuagacaccacguaaccucac

SEQ ID NO: 43493 - DNA, 21 bp, Homo sapiens
gagtgctttgctatgagctgc

SEQ ID NO: 43494 - RNA, 21 nt, RNAi
gugcuuugcuaugagcugcuu

SEQ ID NO: 43495 - RNA, 21 nt, RNAi
uucacgaaacgauacucgacg

SEQ ID NO: 43496 - DNA, 21 bp, Homo sapiens
gagagtgcatcacacaacgag

SEQ ID NO: 43497 - RNA, 21 nt, RNAi
gagugcaucacacaacgaguu

SEQ ID NO: 43498 - RNA, 21 nt, RNAi
uucucacguaguguguugcuc

SEQ ID NO: 43499 - DNA, 21 bp, Homo sapiens
gagtgcatcacacaacgagac

SEQ ID NO: 43500 - RNA, 21 nt, RNAi
gugcaucacacaacgagacuu

SEQ ID NO: 43501 - RNA, 21 nt, RNAi
uucacguaguguguugcucug

SEQ ID NO: 43502 - DNA, 21 bp, Homo sapiens
gagacctatcgccgcatcgtc

SEQ ID NO: 43503 - RNA, 21 nt, RNAi
gaccuaucgccgcaucgucuu

SEQ ID NO: 43504 - RNA, 21 nt, RNAi
uucuggauagcggcguagcag

SEQ ID NO: 43505 - DNA, 21 bp, Homo sapiens
gacctatcgccgcatcgtcaa

SEQ ID NO: 43506 - RNA, 21 nt, RNAi
ccuaucgccgcaucgucaauu

SEQ ID NO: 43507 - RNA, 21 nt, RNAi
uuggauagcggcguagcaguu

SEQ ID NO: 43508 - DNA, 21 bp, Homo sapiens
gacctcatctccaaactgctc

SEQ ID NO: 43509 - RNA, 21 nt, RNAi
ccucaucuccaaacugcucuu

SEQ ID NO: 43510 - RNA, 21 nt, RNAi
uuggaguagagguuugacgag

SEQ ID NO: 43511 - DNA, 21 bp, Homo sapiens
taacgcggcacttcacaattg

SEQ ID NO: 43512 - RNA, 21 nt, RNAi
acgcggcacuucacaauuguu

SEQ ID NO: 43513 - RNA, 21 nt, RNAi
uuugcgccgugaaguguuaac

SEQ ID NO: 43514 - DNA, 21 bp, Homo sapiens
tatgaccggaggaggatctac

SEQ ID NO: 43515 - RNA, 21 nt, RNAi
ugaccggaggaggaucuacuu

SEQ ID NO: 43516 - RNA, 21 nt, RNAi
uuacuggccuccuccuagaug

SEQ ID NO: 43517 - DNA, 21 bp, Homo sapiens
tacttgattctagagtatgcc

SEQ ID NO: 43518 - RNA, 21 nt, RNAi
cuugauucuagaguaugccuu

SEQ ID NO: 43519 - RNA, 21 nt, RNAi
uugaacuaagaucucauacgg

SEQ ID NO: 43520 - DNA, 21 bp, Homo sapiens
tacaaggagctgcagaagagc

SEQ ID NO: 43521 - RNA, 21 nt, RNAi
caaggagcugcagaagagcuu

SEQ ID NO: 43522 - RNA, 21 nt, RNAi
uuguuccucgacgucuucucg

SEQ ID NO: 43523 - DNA, 21 bp, Homo sapiens
tatcgccgcatcgtcaaggtg

SEQ ID NO: 43524 - RNA, 21 nt, RNAi
ucgccgcaucgucaagguguu

SEQ ID NO: 43525 - RNA, 21 nt, RNAi
uuagcggcguagcaguuccac

SEQ ID NO: 43526 - DNA, 21 bp, Homo sapiens
tacctcctcctttgtttaata

SEQ ID NO: 43527 - RNA, 21 nt, RNAi
ccuccuccuuuguuuaauauu

SEQ ID NO: 43528 - RNA, 21 nt, RNAi
uuggaggaggaaacaaauuau

SEQ ID NO: 43529 - DNA, 21 bp, Homo sapiens
aacgcggcacttcacaattga

SEQ ID NO: 43530 - RNA, 21 nt, RNAi
cgcggcacuucacaauugauu

SEQ ID NO: 43531 - RNA, 21 nt, RNAi
uugcgccgugaaguguuaacu

SEQ ID NO: 43532 - DNA, 21 bp, Homo sapiens
aacatcctgcgtctctacaac

SEQ ID NO: 43533 - RNA, 21 nt, RNAi
cauccugcgucucuacaacuu

SEQ ID NO: 43534 - RNA, 21 nt, RNAi
uuguaggacgcagagauguug

SEQ ID NO: 43535 - DNA, 21 bp, Homo sapiens
caagtttggaaacgtgtactt

SEQ ID NO: 43536 - RNA, 21 nt, RNAi
aguuuggaaacguguacuuuu

SEQ ID NO: 43537 - RNA, 21 nt, RNAi
uuucaaaccuuugcacaugaa

SEQ ID NO: 43538 - DNA, 21 bp, Homo sapiens
cagagagatcgaaatccaggc

SEQ ID NO: 43539 - RNA, 21 nt, RNAi
gagagaucgaaauccaggcuu

SEQ ID NO: 43540 - RNA, 21 nt, RNAi
uucucucuagcuuuagguccg

SEQ ID NO: 43541 - DNA, 21 bp, Homo sapiens
catcctgcgtctctacaacta

SEQ ID NO: 43542 - RNA, 21 nt, RNAi
uccugcgucucuacaacuauu

SEQ ID NO: 43543 - RNA, 21 nt, RNAi
uuaggacgcagagauguugau

SEQ ID NO: 43544 - DNA, 21 bp, Homo sapiens
cacatttgacgagcagcgaac

SEQ ID NO: 43545 - RNA, 21 nt, RNAi
cauuugacgagcagcgaacuu

SEQ ID NO: 43546 - RNA, 21 nt, RNAi
uuguaaacugcucgucgcuug

SEQ ID NO: 43547 - DNA, 21 bp, Homo sapiens
catttgacgagcagcgaacag

SEQ ID NO: 43548 - RNA, 21 nt, RNAi
uuugacgagcagcgaacaguu

SEQ ID NO: 43549 - RNA, 21 nt, RNAi
uuaaacugcucgucgcuuguc

SEQ ID NO: 43550 - DNA, 21 bp, Homo sapiens
catcacacaacgagacctatc

SEQ ID NO: 43551 - RNA, 21 nt, RNAi
ucacacaacgagaccuaucuu

SEQ ID NO: 43552 - RNA, 21 nt, RNAi
uuaguguguugcucuggauag

SEQ ID NO: 43553 - DNA, 21 bp, Homo sapiens
catctccaaactgctcaggca

SEQ ID NO: 43554 - RNA, 21 nt, RNAi
ucuccaaacugcucaggcauu

SEQ ID NO: 43555 - RNA, 21 nt, RNAi
uuagagguuugacgaguccgu

SEQ ID NO: 43556 - DNA, 21 bp, Homo sapiens
gaggaggatctacttgattct

SEQ ID NO: 43557 - RNA, 21 nt, RNAi
ggaggaucuacuugauucuuu

SEQ ID NO: 43558 - RNA, 21 nt, RNAi
uuccuccuagaugaacuaaga

SEQ ID NO: 43559 - DNA, 21 bp, Homo sapiens
gagtgcatcacacaacgagac

SEQ ID NO: 43560 - RNA, 21 nt, RNAi
gugcaucacacaacgagacuu

SEQ ID NO: 43561 - RNA, 21 nt, RNAi
uucacguaguguguugcucug

SEQ ID NO: 43562 - DNA, 21 bp, Homo sapiens
taacgcggcacttcacaattg

SEQ ID NO: 43563 - RNA, 21 nt, RNAi
acgcggcacuucacaauuguu

SEQ ID NO: 43564 - RNA, 21 nt, RNAi
uuugcgccgugaaguguuaac

SEQ ID NO: 43565 - DNA, 21 bp, Homo sapiens
aagaaacttcagtgaaggccg

SEQ ID NO: 43566 - RNA, 21 nt, RNAi
gaaacuucagugaaggccguu

SEQ ID NO: 43567 - RNA, 21 nt, RNAi
uucuuugaagucacuuccggc

SEQ ID NO: 43568 - DNA, 21 bp, Homo sapiens
aaactgcatttcaggacctgt

SEQ ID NO: 43569 - RNA, 21 nt, RNAi
acugcauuucaggaccuguuu

SEQ ID NO: 43570 - RNA, 21 nt, RNAi
uuugacguaaaguccuggaca

SEQ ID NO: 43571 - DNA, 21 bp, Homo sapiens
aactgcatttcaggacctgtt

SEQ ID NO: 43572 - RNA, 21 nt, RNAi
cugcauuucaggaccuguuuu

SEQ ID NO: 43573 - RNA, 21 nt, RNAi
uugacguaaaguccuggacaa

SEQ ID NO: 43574 - DNA, 21 bp, Homo sapiens
aaggctacagctccagttgga

SEQ ID NO: 43575 - RNA, 21 nt, RNAi
ggcuacagcuccaguuggauu

SEQ ID NO: 43576 - RNA, 21 nt, RNAi
uuccgaugucgaggucaaccu

SEQ ID NO: 43577 - DNA, 21 bp, Homo sapiens
aaacgtgttctcgtgactcag

SEQ ID NO: 43578 - RNA, 21 nt, RNAi
acguguucucgugacucaguu

SEQ ID NO: 43579 - RNA, 21 nt, RNAi
uuugcacaagagcacugaguc

SEQ ID NO: 43580 - DNA, 21 bp, Homo sapiens
aacgtgttctcgtgactcagc

SEQ ID NO: 43581 - RNA, 21 nt, RNAi
cguguucucgugacucagcuu

SEQ ID NO: 43582 - RNA, 21 nt, RNAi
uugcacaagagcacugagucg

SEQ ID NO: 43583 - DNA, 21 bp, Homo sapiens
aatttccttgtcagaatccat

SEQ ID NO: 43584 - RNA, 21 nt, RNAi
uuuccuugucagaauccauuu

SEQ ID NO: 43585 - RNA, 21 nt, RNAi
uuaaaggaacagucuuaggua

SEQ ID NO: 43586 - DNA, 21 bp, Homo sapiens
aaatagtggccaggctcagcg

SEQ ID NO: 43587 - RNA, 21 nt, RNAi
auaguggccaggcucagcguu

SEQ ID NO: 43588 - RNA, 21 nt, RNAi
uuuaucaccgguccgagucgc

SEQ ID NO: 43589 - DNA, 21 bp, Homo sapiens
aatagtggccaggctcagcgg

SEQ ID NO: 43590 - RNA, 21 nt, RNAi
uaguggccaggcucagcgguu

SEQ ID NO: 43591 - RNA, 21 nt, RNAi
uuaucaccgguccgagucgcc

SEQ ID NO: 43592 - DNA, 21 bp, Homo sapiens
aaagcttgtctccagtcacaa

SEQ ID NO: 43593 - RNA, 21 nt, RNAi
agcuugucuccagucacaauu

SEQ ID NO: 43594 - RNA, 21 nt, RNAi
uuucgaacagaggucaguguu

SEQ ID NO: 43595 - DNA, 21 bp, Homo sapiens
aagcttgtctccagtcacaag

SEQ ID NO: 43596 - RNA, 21 nt, RNAi
gcuugucuccagucacaaguu

SEQ ID NO: 43597 - RNA, 21 nt, RNAi
uucgaacagaggucaguguuc

SEQ ID NO: 43598 - DNA, 21 bp, Homo sapiens
aagccggttcagaatcagaag

SEQ ID NO: 43599 - RNA, 21 nt, RNAi
gccgguucagaaucagaaguu

SEQ ID NO: 43600 - RNA, 21 nt, RNAi
uucggccaagucuuagucuuc

SEQ ID NO: 43601 - DNA, 21 bp, Homo sapiens
aatcagaagcagaagcaattg

SEQ ID NO: 43602 - RNA, 21 nt, RNAi
ucagaagcagaagcaauuguu

SEQ ID NO: 43603 - RNA, 21 nt, RNAi
uuagucuucgucuucguuaac

SEQ ID NO: 43604 - DNA, 21 bp, Homo sapiens
aagcagaagcaattgcaggca

SEQ ID NO: 43605 - RNA, 21 nt, RNAi
gcagaagcaauugcaggcauu

SEQ ID NO: 43606 - RNA, 21 nt, RNAi
uucgucuucguuaacguccgu

SEQ ID NO: 43607 - DNA, 21 bp, Homo sapiens
aagcaattgcaggcaaccagt

SEQ ID NO: 43608 - RNA, 21 nt, RNAi
gcaauugcaggcaaccaguuu

SEQ ID NO: 43609 - RNA, 21 nt, RNAi
uucguuaacguccguugguca

SEQ ID NO: 43610 - DNA, 21 bp, Homo sapiens
aattgcaggcaaccagtgtac

SEQ ID NO: 43611 - RNA, 21 nt, RNAi
uugcaggcaaccaguguacuu

SEQ ID NO: 43612 - RNA, 21 nt, RNAi
uuaacguccguuggucacaug

SEQ ID NO: 43613 - DNA, 21 bp, Homo sapiens
aaccagtgtacctcatcctgt

SEQ ID NO: 43614 - RNA, 21 nt, RNAi
ccaguguaccucauccuguuu

SEQ ID NO: 43615 - RNA, 21 nt, RNAi
uuggucacauggaguaggaca

SEQ ID NO: 43616 - DNA, 21 bp, Homo sapiens
aaataatcctgaggaggaact

SEQ ID NO: 43617 - RNA, 21 nt, RNAi
auaauccugaggaggaacuuu

SEQ ID NO: 43618 - RNA, 21 nt, RNAi
uuuauuaggacuccuccuuga

SEQ ID NO: 43619 - DNA, 21 bp, Homo sapiens
aataatcctgaggaggaactg

SEQ ID NO: 43620 - RNA, 21 nt, RNAi
uaauccugaggaggaacuguu

SEQ ID NO: 43621 - RNA, 21 nt, RNAi
uuauuaggacuccuccuugac

SEQ ID NO: 43622 - DNA, 21 bp, Homo sapiens
aatcctgaggaggaactggca

SEQ ID NO: 43623 - RNA, 21 nt, RNAi
uccugaggaggaacuggcauu

SEQ ID NO: 43624 - RNA, 21 nt, RNAi
uuaggacuccuccuugaccgu

SEQ ID NO: 43625 - DNA, 21 bp, Homo sapiens
aagactttgaaattggtcgcc

SEQ ID NO: 43626 - RNA, 21 nt, RNAi
gacuuugaaauuggucgccuu

SEQ ID NO: 43627 - RNA, 21 nt, RNAi
uucugaaacuuuaaccagcgg

SEQ ID NO: 43628 - DNA, 21 bp, Homo sapiens
aagcaaagcaagtttattctg

SEQ ID NO: 43629 - RNA, 21 nt, RNAi
gcaaagcaaguuuauucuguu

SEQ ID NO: 43630 - RNA, 21 nt, RNAi
uucguuucguucaaauaagac

SEQ ID NO: 43631 - DNA, 21 bp, Homo sapiens
aaagcaagtttattctggctc

SEQ ID NO: 43632 - RNA, 21 nt, RNAi
agcaaguuuauucuggcucuu

SEQ ID NO: 43633 - RNA, 21 nt, RNAi
uuucguucaaauaagaccgag

SEQ ID NO: 43634 - DNA, 21 bp, Homo sapiens
aagcaagtttattctggctct

SEQ ID NO: 43635 - RNA, 21 nt, RNAi
gcaaguuuauucuggcucuuu

SEQ ID NO: 43636 - RNA, 21 nt, RNAi
uucguucaaauaagaccgaga

SEQ ID NO: 43637 - DNA, 21 bp, Homo sapiens
aagtgttatttaaagctcagc

SEQ ID NO: 43638 - RNA, 21 nt, RNAi
guguuauuuaaagcucagcuu

SEQ ID NO: 43639 - RNA, 21 nt, RNAi
uucacaauaaauuucgagucg

SEQ ID NO: 43640 - DNA, 21 bp, Homo sapiens
aaagctcagctggagaaagcc

SEQ ID NO: 43641 - RNA, 21 nt, RNAi
agcucagcuggagaaagccuu

SEQ ID NO: 43642 - RNA, 21 nt, RNAi
uuucgagucgaccucuuucgg

SEQ ID NO: 43643 - DNA, 21 bp, Homo sapiens
aagctcagctggagaaagccg

SEQ ID NO: 43644 - RNA, 21 nt, RNAi
gcucagcuggagaaagccguu

SEQ ID NO: 43645 - RNA, 21 nt, RNAi
uucgagucgaccucuuucggc

SEQ ID NO: 43646 - DNA, 21 bp, Homo sapiens
aaagccggagtggagcatcag

SEQ ID NO: 43647 - RNA, 21 nt, RNAi
agccggaguggagcaucaguu

SEQ ID NO: 43648 - RNA, 21 nt, RNAi
uuucggccucaccucguaguc

SEQ ID NO: 43649 - DNA, 21 bp, Homo sapiens
aagccggagtggagcatcagc

SEQ ID NO: 43650 - RNA, 21 nt, RNAi
gccggaguggagcaucagcuu

SEQ ID NO: 43651 - RNA, 21 nt, RNAi
uucggccucaccucguagucg

SEQ ID NO: 43652 - DNA, 21 bp, Homo sapiens
aagagaagtagaaatacagtc

SEQ ID NO: 43653 - RNA, 21 nt, RNAi
gagaaguagaaauacagucuu

SEQ ID NO: 43654 - RNA, 21 nt, RNAi
uucucuucaucuuuaugucag

SEQ ID NO: 43655 - DNA, 21 bp, Homo sapiens
aattctggaatatgcaccact

SEQ ID NO: 43656 - RNA, 21 nt, RNAi
uucuggaauaugcaccacuuu

SEQ ID NO: 43657 - RNA, 21 nt, RNAi
uuaagaccuuauacgugguga

SEQ ID NO: 43658 - DNA, 21 bp, Homo sapiens
aatatgcaccacttggaacag

SEQ ID NO: 43659 - RNA, 21 nt, RNAi
uaugcaccacuuggaacaguu

SEQ ID NO: 43660 - RNA, 21 nt, RNAi
uuauacguggugaaccuuguc

SEQ ID NO: 43661 - DNA, 21 bp, Homo sapiens
aactttcaaagtttgatgagc

SEQ ID NO: 43662 - RNA, 21 nt, RNAi
cuuucaaaguuugaugagcuu

SEQ ID NO: 43663 - RNA, 21 nt, RNAi
uugaaaguuucaaacuacucg

SEQ ID NO: 43664 - DNA, 21 bp, Homo sapiens
aaagtttgatgagcagagaac

SEQ ID NO: 43665 - RNA, 21 nt, RNAi
aguuugaugagcagagaacuu

SEQ ID NO: 43666 - RNA, 21 nt, RNAi
uuucaaacuacucgucucuug

SEQ ID NO: 43667 - DNA, 21 bp, Homo sapiens
aagtttgatgagcagagaact

SEQ ID NO: 43668 - RNA, 21 nt, RNAi
guuugaugagcagagaacuuu

SEQ ID NO: 43669 - RNA, 21 nt, RNAi
uucaaacuacucgucucuuga

SEQ ID NO: 43670 - DNA, 21 bp, Homo sapiens
aagagagttattcatagagac

SEQ ID NO: 43671 - RNA, 21 nt, RNAi
gagaguuauucauagagacuu

SEQ ID NO: 43672 - RNA, 21 nt, RNAi
uucucucaauaaguaucucug

SEQ ID NO: 43673 - DNA, 21 bp, Homo sapiens
aagccagagaacttacttctt

SEQ ID NO: 43674 - RNA, 21 nt, RNAi
gccagagaacuuacuucuuuu

SEQ ID NO: 43675 - RNA, 21 nt, RNAi
uucggucucuugaaugaagaa

SEQ ID NO: 43676 - DNA, 21 bp, Homo sapiens
aacttacttcttggatcagct

SEQ ID NO: 43677 - RNA, 21 nt, RNAi
cuuacuucuuggaucagcuuu

SEQ ID NO: 43678 - RNA, 21 nt, RNAi
uugaaugaagaaccuagucga

SEQ ID NO: 43679 - DNA, 21 bp, Homo sapiens
aaatgattgaaggtcggatgc

SEQ ID NO: 43680 - RNA, 21 nt, RNAi
augauugaaggucggaugcuu

SEQ ID NO: 43681 - RNA, 21 nt, RNAi
uuuacuaacuuccagccuacg

SEQ ID NO: 43682 - DNA, 21 bp, Homo sapiens
aatgattgaaggtcggatgca

SEQ ID NO: 43683 - RNA, 21 nt, RNAi
ugauugaaggucggaugcauu

SEQ ID NO: 43684 - RNA, 21 nt, RNAi
uuacuaacuuccagccuacgu

SEQ ID NO: 43685 - DNA, 21 bp, Homo sapiens
aaggtcggatgcatgatgaga

SEQ ID NO: 43686 - RNA, 21 nt, RNAi
ggucggaugcaugaugagauu

SEQ ID NO: 43687 - RNA, 21 nt, RNAi
uuccagccuacguacuacucu

SEQ ID NO: 43688 - DNA, 21 bp, Homo sapiens
aaggtggatctctggagcctt

SEQ ID NO: 43689 - RNA, 21 nt, RNAi
gguggaucucuggagccuuuu

SEQ ID NO: 43690 - RNA, 21 nt, RNAi
uuccaccuagagaccucggaa

SEQ ID NO: 43691 - DNA, 21 bp, Homo sapiens
aaacacataccaagagaccta

SEQ ID NO: 43692 - RNA, 21 nt, RNAi
acacauaccaagagaccuauu

SEQ ID NO: 43693 - RNA, 21 nt, RNAi
uuuguguaugguucucuggau

SEQ ID NO: 43694 - DNA, 21 bp, Homo sapiens
aacacataccaagagacctac

SEQ ID NO: 43695 - RNA, 21 nt, RNAi
cacauaccaagagaccuacuu

SEQ ID NO: 43696 - RNA, 21 nt, RNAi
uuguguaugguucucuggaug

SEQ ID NO: 43697 - DNA, 21 bp, Homo sapiens
aagactgttgaagcataatcc

SEQ ID NO: 43698 - RNA, 21 nt, RNAi
gacuguugaagcauaauccuu

SEQ ID NO: 43699 - RNA, 21 nt, RNAi
uucugacaacuucguauuagg

SEQ ID NO: 43700 - DNA, 21 bp, Homo sapiens
aatgctcagagaagtacttga

SEQ ID NO: 43701 - RNA, 21 nt, RNAi
ugcucagagaaguacuugauu

SEQ ID NO: 43702 - RNA, 21 nt, RNAi
uuacgagucucuucaugaacu

SEQ ID NO: 43703 - DNA, 21 bp, Homo sapiens
aaacaaagaatcagctagcaa

SEQ ID NO: 43704 - RNA, 21 nt, RNAi
acaaagaaucagcuagcaauu

SEQ ID NO: 43705 - RNA, 21 nt, RNAi
uuuguuucuuagucgaucguu

SEQ ID NO: 43706 - DNA, 21 bp, Homo sapiens
aacaaagaatcagctagcaaa

SEQ ID NO: 43707 - RNA, 21 nt, RNAi
caaagaaucagcuagcaaauu

SEQ ID NO: 43708 - RNA, 21 nt, RNAi
uuguuucuuagucgaucguuu

SEQ ID NO: 43709 - DNA, 21 bp, Homo sapiens
aaagaatcagctagcaaacag

SEQ ID NO: 43710 - RNA, 21 nt, RNAi
agaaucagcuagcaaacaguu

SEQ ID NO: 43711 - RNA, 21 nt, RNAi
uuucuuagucgaucguuuguc

SEQ ID NO: 43712 - DNA, 21 bp, Homo sapiens
aagaatcagctagcaaacagt

SEQ ID NO: 43713 - RNA, 21 nt, RNAi
gaaucagcuagcaaacaguuu

SEQ ID NO: 43714 - RNA, 21 nt, RNAi
uucuuagucgaucguuuguca

SEQ ID NO: 43715 - DNA, 21 bp, Homo sapiens
aatcagctagcaaacagtctt

SEQ ID NO: 43716 - RNA, 21 nt, RNAi
ucagcuagcaaacagucuuuu

SEQ ID NO: 43717 - RNA, 21 nt, RNAi
uuagucgaucguuugucagaa

SEQ ID NO: 43718 - DNA, 21 bp, Homo sapiens
aaacagtcttaggaatcgtgc

SEQ ID NO: 43719 - RNA, 21 nt, RNAi
acagucuuaggaaucgugcuu

SEQ ID NO: 43720 - RNA, 21 nt, RNAi
uuugucagaauccuuagcacg

SEQ ID NO: 43721 - DNA, 21 bp, Homo sapiens
aacagtcttaggaatcgtgca

SEQ ID NO: 43722 - RNA, 21 nt, RNAi
cagucuuaggaaucgugcauu

SEQ ID NO: 43723 - RNA, 21 nt, RNAi
uugucagaauccuuagcacgu

SEQ ID NO: 43724 - DNA, 21 bp, Homo sapiens
aacctgacaggaacatgctac

SEQ ID NO: 43725 - RNA, 21 nt, RNAi
ccugacaggaacaugcuacuu

SEQ ID NO: 43726 - RNA, 21 nt, RNAi
uuggacuguccuuguacgaug

SEQ ID NO: 43727 - DNA, 21 bp, Homo sapiens
aatctagaacgctacacaaga

SEQ ID NO: 43728 - RNA, 21 nt, RNAi
ucuagaacgcuacacaagauu

SEQ ID NO: 43729 - RNA, 21 nt, RNAi
uuagaucuugcgauguguucu

SEQ ID NO: 43730 - DNA, 21 bp, Homo sapiens
aaagctccacatcaataaaca

SEQ ID NO: 43731 - RNA, 21 nt, RNAi
agcuccacaucaauaaacauu

SEQ ID NO: 43732 - RNA, 21 nt, RNAi
uuucgagguguaguuauuugu

SEQ ID NO: 43733 - DNA, 21 bp, Homo sapiens
aagctccacatcaataaacat

SEQ ID NO: 43734 - RNA, 21 nt, RNAi
gcuccacaucaauaaacauuu

SEQ ID NO: 43735 - RNA, 21 nt, RNAi
uucgagguguaguuauuugua

SEQ ID NO: 43736 - DNA, 21 bp, Homo sapiens
aataaacatgacactctgaag

SEQ ID NO: 43737 - RNA, 21 nt, RNAi
uaaacaugacacucugaaguu

SEQ ID NO: 43738 - RNA, 21 nt, RNAi
uuauuuguacugugagacuuc

SEQ ID NO: 43739 - DNA, 21 bp, Homo sapiens
aaacatgacactctgaagtga

SEQ ID NO: 43740 - RNA, 21 nt, RNAi
acaugacacucugaagugauu

SEQ ID NO: 43741 - RNA, 21 nt, RNAi
uuuguacugugagacuucacu

SEQ ID NO: 43742 - DNA, 21 bp, Homo sapiens
aacatgacactctgaagtgaa

SEQ ID NO: 43743 - RNA, 21 nt, RNAi
caugacacucugaagugaauu

SEQ ID NO: 43744 - RNA, 21 nt, RNAi
uuguacugugagacuucacuu

SEQ ID NO: 43745 - DNA, 21 bp, Homo sapiens
aagtgaaagtagccacgagaa

SEQ ID NO: 43746 - RNA, 21 nt, RNAi
gugaaaguagccacgagaauu

SEQ ID NO: 43747 - RNA, 21 nt, RNAi
uucacuuucaucggugcucuu

SEQ ID NO: 43748 - DNA, 21 bp, Homo sapiens
aaagtagccacgagaattgtg

SEQ ID NO: 43749 - RNA, 21 nt, RNAi
aguagccacgagaauuguguu

SEQ ID NO: 43750 - RNA, 21 nt, RNAi
uuucaucggugcucuuaacac

SEQ ID NO: 43751 - DNA, 21 bp, Homo sapiens
aagtagccacgagaattgtgc

SEQ ID NO: 43752 - RNA, 21 nt, RNAi
guagccacgagaauugugcuu

SEQ ID NO: 43753 - RNA, 21 nt, RNAi
uucaucggugcucuuaacacg

SEQ ID NO: 43754 - DNA, 21 bp, Homo sapiens
aattgtgctacttatactggt

SEQ ID NO: 43755 - RNA, 21 nt, RNAi
uugugcuacuuauacugguuu

SEQ ID NO: 43756 - RNA, 21 nt, RNAi
uuaacacgaugaauaugacca

SEQ ID NO: 43757 - DNA, 21 bp, Homo sapiens
aatctggaggcaaggttcgac

SEQ ID NO: 43758 - RNA, 21 nt, RNAi
ucuggaggcaagguucgacuu

SEQ ID NO: 43759 - RNA, 21 nt, RNAi
uuagaccuccguuccaagcug

SEQ ID NO: 43760 - DNA, 21 bp, Homo sapiens
aaatccagagcctggctgtgg

SEQ ID NO: 43761 - RNA, 21 nt, RNAi
auccagagccuggcugugguu

SEQ ID NO: 43762 - RNA, 21 nt, RNAi
uuuaggucucggaccgacacc

SEQ ID NO: 43763 - DNA, 21 bp, Homo sapiens
aaggagctgtgcaataacctt

SEQ ID NO: 43764 - RNA, 21 nt, RNAi
ggagcugugcaauaaccuuuu

SEQ ID NO: 43765 - RNA, 21 nt, RNAi
uuccucgacacguuauuggaa

SEQ ID NO: 43766 - DNA, 21 bp, Homo sapiens
aataaccttcctagtacctga

SEQ ID NO: 43767 - RNA, 21 nt, RNAi
uaaccuuccuaguaccugauu

SEQ ID NO: 43768 - RNA, 21 nt, RNAi
uuauuggaaggaucauggacu

SEQ ID NO: 43769 - DNA, 21 bp, Homo sapiens
aaccttcctagtacctgagtg

SEQ ID NO: 43770 - RNA, 21 nt, RNAi
ccuuccuaguaccugaguguu

SEQ ID NO: 43771 - RNA, 21 nt, RNAi
uuggaaggaucauggacucac

SEQ ID NO: 43772 - DNA, 21 bp, Homo sapiens
aagcctggtaaagctgttgga

SEQ ID NO: 43773 - RNA, 21 nt, RNAi
gccugguaaagcuguuggauu

SEQ ID NO: 43774 - RNA, 21 nt, RNAi
uucggaccauuucgacaaccu

SEQ ID NO: 43775 - DNA, 21 bp, Homo sapiens
aaagctgttggaatgagtatg

SEQ ID NO: 43776 - RNA, 21 nt, RNAi
agcuguuggaaugaguauguu

SEQ ID NO: 43777 - RNA, 21 nt, RNAi
uuucgacaaccuuacucauac

SEQ ID NO: 43778 - DNA, 21 bp, Homo sapiens
aagctgttggaatgagtatgt

SEQ ID NO: 43779 - RNA, 21 nt, RNAi
gcuguuggaaugaguauguuu

SEQ ID NO: 43780 - RNA, 21 nt, RNAi
uucgacaaccuuacucauaca

SEQ ID NO: 43781 - DNA, 21 bp, Homo sapiens
aatgctgtgtgtctgtccggc

SEQ ID NO: 43782 - RNA, 21 nt, RNAi
ugcugugugucuguccggcuu

SEQ ID NO: 43783 - RNA, 21 nt, RNAi
uuacgacacacagacaggccg

SEQ ID NO: 43784 - DNA, 21 bp, Homo sapiens
aaataggaacacgtgctctac

SEQ ID NO: 43785 - RNA, 21 nt, RNAi
auaggaacacgugcucuacuu

SEQ ID NO: 43786 - RNA, 21 nt, RNAi
uuuauccuugugcacgagaug

SEQ ID NO: 43787 - DNA, 21 bp, Homo sapiens
aataggaacacgtgctctacc

SEQ ID NO: 43788 - RNA, 21 nt, RNAi
uaggaacacgugcucuaccuu

SEQ ID NO: 43789 - RNA, 21 nt, RNAi
uuauccuugugcacgagaugg

SEQ ID NO: 43790 - DNA, 21 bp, Homo sapiens
aacacgtgctctacctccatt

SEQ ID NO: 43791 - RNA, 21 nt, RNAi
cacgugcucuaccuccauuuu

SEQ ID NO: 43792 - RNA, 21 nt, RNAi
uugugcacgagauggagguaa

SEQ ID NO: 43793 - DNA, 21 bp, Homo sapiens
aagaggccatgtgtctcagag

SEQ ID NO: 43794 - RNA, 21 nt, RNAi
gaggccaugugucucagaguu

SEQ ID NO: 43795 - RNA, 21 nt, RNAi
uucuccgguacacagagucuc

SEQ ID NO: 43796 - DNA, 21 bp, Homo sapiens
aaacattggagtcatagcatg

SEQ ID NO: 43797 - RNA, 21 nt, RNAi
acauuggagucauagcauguu

SEQ ID NO: 43798 - RNA, 21 nt, RNAi
uuuguaaccucaguaucguac

SEQ ID NO: 43799 - DNA, 21 bp, Homo sapiens
aacattggagtcatagcatgt

SEQ ID NO: 43800 - RNA, 21 nt, RNAi
cauuggagucauagcauguuu

SEQ ID NO: 43801 - RNA, 21 nt, RNAi
uuguaaccucaguaucguaca

SEQ ID NO: 43802 - DNA, 21 bp, Homo sapiens
catcatggaccgatctaaaga

SEQ ID NO: 43803 - RNA, 21 nt, RNAi
ucauggaccgaucuaaagauu

SEQ ID NO: 43804 - RNA, 21 nt, RNAi
uuaguaccuggcuagauuucu

SEQ ID NO: 43805 - DNA, 21 bp, Homo sapiens
catttcaggacctgttaaggc

SEQ ID NO: 43806 - RNA, 21 nt, RNAi
uuucaggaccuguuaaggcuu

SEQ ID NO: 43807 - RNA, 21 nt, RNAi
uuaaaguccuggacaauuccg

SEQ ID NO: 43808 - DNA, 21 bp, Homo sapiens
caggacctgttaaggctacag

SEQ ID NO: 43809 - RNA, 21 nt, RNAi
ggaccuguuaaggcuacaguu

SEQ ID NO: 43810 - RNA, 21 nt, RNAi
uuccuggacaauuccgauguc

SEQ ID NO: 43811 - DNA, 21 bp, Homo sapiens
cagctccagttggaggtccaa

SEQ ID NO: 43812 - RNA, 21 nt, RNAi
gcuccaguuggagguccaauu

SEQ ID NO: 43813 - RNA, 21 nt, RNAi
uucgaggucaaccuccagguu

SEQ ID NO: 43814 - DNA, 21 bp, Homo sapiens
cagcaatttccttgtcagaat

SEQ ID NO: 43815 - RNA, 21 nt, RNAi
gcaauuuccuugucagaauuu

SEQ ID NO: 43816 - RNA, 21 nt, RNAi
uucguuaaaggaacagucuua

SEQ ID NO: 43817 - DNA, 21 bp, Homo sapiens
caatttccttgtcagaatcca

SEQ ID NO: 43818 - RNA, 21 nt, RNAi
auuuccuugucagaauccauu

SEQ ID NO: 43819 - RNA, 21 nt, RNAi
uuuaaaggaacagucuuaggu

SEQ ID NO: 43820 - DNA, 21 bp, Homo sapiens
cagaatccattacctgtaaat

SEQ ID NO: 43821 - RNA, 21 nt, RNAi
gaauccauuaccuguaaauuu

SEQ ID NO: 43822 - RNA, 21 nt, RNAi
uucuuagguaauggacauuua

SEQ ID NO: 43823 - DNA, 21 bp, Homo sapiens
cattacctgtaaatagtggcc

SEQ ID NO: 43824 - RNA, 21 nt, RNAi
uuaccuguaaauaguggccuu

SEQ ID NO: 43825 - RNA, 21 nt, RNAi
uuaauggacauuuaucaccgg

SEQ ID NO: 43826 - DNA, 21 bp, Homo sapiens
cagcgcattcctttgcaagca

SEQ ID NO: 43827 - RNA, 21 nt, RNAi
gcgcauuccuuugcaagcauu

SEQ ID NO: 43828 - RNA, 21 nt, RNAi
uucgcguaaggaaacguucgu

SEQ ID NO: 43829 - DNA, 21 bp, Homo sapiens
cagtcacaagccggttcagaa

SEQ ID NO: 43830 - RNA, 21 nt, RNAi
gucacaagccgguucagaauu

SEQ ID NO: 43831 - RNA, 21 nt, RNAi
uucaguguucggccaagucuu

SEQ ID NO: 43832 - DNA, 21 bp, Homo sapiens
cacaagccggttcagaatcag

SEQ ID NO: 43833 - RNA, 21 nt, RNAi
caagccgguucagaaucaguu

SEQ ID NO: 43834 - RNA, 21 nt, RNAi
uuguucggccaagucuuaguc

SEQ ID NO: 43835 - DNA, 21 bp, Homo sapiens
caagccggttcagaatcagaa

SEQ ID NO: 43836 - RNA, 21 nt, RNAi
agccgguucagaaucagaauu

SEQ ID NO: 43837 - RNA, 21 nt, RNAi
uuucggccaagucuuagucuu

SEQ ID NO: 43838 - DNA, 21 bp, Homo sapiens
cagaatcagaagcagaagcaa

SEQ ID NO: 43839 - RNA, 21 nt, RNAi
gaaucagaagcagaagcaauu

SEQ ID NO: 43840 - RNA, 21 nt, RNAi
uucuuagucuucgucuucguu

SEQ ID NO: 43841 - DNA, 21 bp, Homo sapiens
cagaagcagaagcaattgcag

SEQ ID NO: 43842 - RNA, 21 nt, RNAi
gaagcagaagcaauugcaguu

SEQ ID NO: 43843 - RNA, 21 nt, RNAi
uucuucgucuucguuaacguc

SEQ ID NO: 43844 - DNA, 21 bp, Homo sapiens
cagaagcaattgcaggcaacc

SEQ ID NO: 43845 - RNA, 21 nt, RNAi
gaagcaauugcaggcaaccuu

SEQ ID NO: 43846 - RNA, 21 nt, RNAi
uucuucguuaacguccguugg

SEQ ID NO: 43847 - DNA, 21 bp, Homo sapiens
caattgcaggcaaccagtgta

SEQ ID NO: 43848 - RNA, 21 nt, RNAi
auugcaggcaaccaguguauu

SEQ ID NO: 43849 - RNA, 21 nt, RNAi
uuuaacguccguuggucacau

SEQ ID NO: 43850 - DNA, 21 bp, Homo sapiens
caggcaaccagtgtacctcat

SEQ ID NO: 43851 - RNA, 21 nt, RNAi
ggcaaccaguguaccucauuu

SEQ ID NO: 43852 - RNA, 21 nt, RNAi
uuccguuggucacauggagua

SEQ ID NO: 43853 - DNA, 21 bp, Homo sapiens
caaccagtgtacctcatcctg

SEQ ID NO: 43854 - RNA, 21 nt, RNAi
accaguguaccucauccuguu

SEQ ID NO: 43855 - RNA, 21 nt, RNAi
uuuggucacauggaguaggac

SEQ ID NO: 43856 - DNA, 21 bp, Homo sapiens
cagtgtacctcatcctgtctc

SEQ ID NO: 43857 - RNA, 21 nt, RNAi
guguaccucauccugucucuu

SEQ ID NO: 43858 - RNA, 21 nt, RNAi
uucacauggaguaggacagag

SEQ ID NO: 43859 - DNA, 21 bp, Homo sapiens
catcctgtctccaggccactg

SEQ ID NO: 43860 - RNA, 21 nt, RNAi
uccugucuccaggccacuguu

SEQ ID NO: 43861 - RNA, 21 nt, RNAi
uuaggacagagguccggugac

SEQ ID NO: 43862 - DNA, 21 bp, Homo sapiens
caaagcaagtttattctggct

SEQ ID NO: 43863 - RNA, 21 nt, RNAi
aagcaaguuuauucuggcuuu

SEQ ID NO: 43864 - RNA, 21 nt, RNAi
uuuucguucaaauaagaccga

SEQ ID NO: 43865 - DNA, 21 bp, Homo sapiens
caagtttattctggctcttaa

SEQ ID NO: 43866 - RNA, 21 nt, RNAi
aguuuauucuggcucuuaauu

SEQ ID NO: 43867 - RNA, 21 nt, RNAi
uuucaaauaagaccgagaauu

SEQ ID NO: 43868 - DNA, 21 bp, Homo sapiens
cagctggagaaagccggagtg

SEQ ID NO: 43869 - RNA, 21 nt, RNAi
gcuggagaaagccggaguguu

SEQ ID NO: 43870 - RNA, 21 nt, RNAi
uucgaccucuuucggccucac

SEQ ID NO: 43871 - DNA, 21 bp, Homo sapiens
catcagctcagaagagaagta

SEQ ID NO: 43872 - RNA, 21 nt, RNAi
ucagcucagaagagaaguauu

SEQ ID NO: 43873 - RNA, 21 nt, RNAi
uuagucgagucuucucuucau

SEQ ID NO: 43874 - DNA, 21 bp, Homo sapiens
cagctcagaagagaagtagaa

SEQ ID NO: 43875 - RNA, 21 nt, RNAi
gcucagaagagaaguagaauu

SEQ ID NO: 43876 - RNA, 21 nt, RNAi
uucgagucuucucuucaucuu

SEQ ID NO: 43877 - DNA, 21 bp, Homo sapiens
cagaagagaagtagaaataca

SEQ ID NO: 43878 - RNA, 21 nt, RNAi
gaagagaaguagaaauacauu

SEQ ID NO: 43879 - RNA, 21 nt, RNAi
uucuucucuucaucuuuaugu

SEQ ID NO: 43880 - DNA, 21 bp, Homo sapiens
caccttcggcatcctaatatt

SEQ ID NO: 43881 - RNA, 21 nt, RNAi
ccuucggcauccuaauauuuu

SEQ ID NO: 43882 - RNA, 21 nt, RNAi
uuggaagccguaggauuauaa

SEQ ID NO: 43883 - DNA, 21 bp, Homo sapiens
catcctaatattcttagactg

SEQ ID NO: 43884 - RNA, 21 nt, RNAi
uccuaauauucuuagacuguu

SEQ ID NO: 43885 - RNA, 21 nt, RNAi
uuaggauuauaagaaucugac

SEQ ID NO: 43886 - DNA, 21 bp, Homo sapiens
catgatgctaccagagtctac

SEQ ID NO: 43887 - RNA, 21 nt, RNAi
ugaugcuaccagagucuacuu

SEQ ID NO: 43888 - RNA, 21 nt, RNAi
uuacuacgauggucucagaug

SEQ ID NO: 43889 - DNA, 21 bp, Homo sapiens
cagagtctacctaattctgga

SEQ ID NO: 43890 - RNA, 21 nt, RNAi
gagucuaccuaauucuggauu

SEQ ID NO: 43891 - RNA, 21 nt, RNAi
uucucagauggauuaagaccu

SEQ ID NO: 43892 - DNA, 21 bp, Homo sapiens
caccacttggaacagtttata

SEQ ID NO: 43893 - RNA, 21 nt, RNAi
ccacuuggaacaguuuauauu

SEQ ID NO: 43894 - RNA, 21 nt, RNAi
uuggugaaccuugucaaauau

SEQ ID NO: 43895 - DNA, 21 bp, Homo sapiens
cacttggaacagtttatagag

SEQ ID NO: 43896 - RNA, 21 nt, RNAi
cuuggaacaguuuauagaguu

SEQ ID NO: 43897 - RNA, 21 nt, RNAi
uugaaccuugucaaauaucuc

SEQ ID NO: 43898 - DNA, 21 bp, Homo sapiens
cagtttatagagaacttcaga

SEQ ID NO: 43899 - RNA, 21 nt, RNAi
guuuauagagaacuucagauu

SEQ ID NO: 43900 - RNA, 21 nt, RNAi
uucaaauaucucuugaagucu

SEQ ID NO: 43901 - DNA, 21 bp, Homo sapiens
caaagtttgatgagcagagaa

SEQ ID NO: 43902 - RNA, 21 nt, RNAi
aaguuugaugagcagagaauu

SEQ ID NO: 43903 - RNA, 21 nt, RNAi
uuuucaaacuacucgucucuu

SEQ ID NO: 43904 - DNA, 21 bp, Homo sapiens
cagagaactgctacttatata

SEQ ID NO: 43905 - RNA, 21 nt, RNAi
gagaacugcuacuuauauauu

SEQ ID NO: 43906 - RNA, 21 nt, RNAi
uucucuugacgaugaauauau

SEQ ID NO: 43907 - DNA, 21 bp, Homo sapiens
cattcgaagagagttattcat

SEQ ID NO: 43908 - RNA, 21 nt, RNAi
uucgaagagaguuauucauuu

SEQ ID NO: 43909 - RNA, 21 nt, RNAi
uuaagcuucucucaauaagua

SEQ ID NO: 43910 - DNA, 21 bp, Homo sapiens
catagagacattaagccagag

SEQ ID NO: 43911 - RNA, 21 nt, RNAi
uagagacauuaagccagaguu

SEQ ID NO: 43912 - RNA, 21 nt, RNAi
uuaucucuguaauucggucuc

SEQ ID NO: 43913 - DNA, 21 bp, Homo sapiens
cattaagccagagaacttact

SEQ ID NO: 43914 - RNA, 21 nt, RNAi
uuaagccagagaacuuacuuu

SEQ ID NO: 43915 - RNA, 21 nt, RNAi
uuaauucggucucuugaauga

SEQ ID NO: 43916 - DNA, 21 bp, Homo sapiens
cagagaacttacttcttggat

SEQ ID NO: 43917 - RNA, 21 nt, RNAi
gagaacuuacuucuuggauuu

SEQ ID NO: 43918 - RNA, 21 nt, RNAi
uucucuugaaugaagaaccua

SEQ ID NO: 43919 - DNA, 21 bp, Homo sapiens
cagtacatgctccatcttcca

SEQ ID NO: 43920 - RNA, 21 nt, RNAi
guacaugcuccaucuuccauu

SEQ ID NO: 43921 - RNA, 21 nt, RNAi
uucauguacgagguagaaggu

SEQ ID NO: 43922 - DNA, 21 bp, Homo sapiens
catgctccatcttccaggagg

SEQ ID NO: 43923 - RNA, 21 nt, RNAi
ugcuccaucuuccaggagguu

SEQ ID NO: 43924 - RNA, 21 nt, RNAi
uuacgagguagaagguccucc

SEQ ID NO: 43925 - DNA, 21 bp, Homo sapiens
catcttccaggaggaccactc

SEQ ID NO: 43926 - RNA, 21 nt, RNAi
ucuuccaggaggaccacucuu

SEQ ID NO: 43927 - RNA, 21 nt, RNAi
uuagaagguccuccuggugag

SEQ ID NO: 43928 - DNA, 21 bp, Homo sapiens
caggaggaccactctctgtgg

SEQ ID NO: 43929 - RNA, 21 nt, RNAi
ggaggaccacucucugugguu

SEQ ID NO: 43930 - RNA, 21 nt, RNAi
uuccuccuggugagagacacc

SEQ ID NO: 43931 - DNA, 21 bp, Homo sapiens
catgatgagaaggtggatctc

SEQ ID NO: 43932 - RNA, 21 nt, RNAi
ugaugagaagguggaucucuu

SEQ ID NO: 43933 - RNA, 21 nt, RNAi
uuacuacucuuccaccuagag

SEQ ID NO: 43934 - DNA, 21 bp, Homo sapiens
caaacacataccaagagacct

SEQ ID NO: 43935 - RNA, 21 nt, RNAi
aacacauaccaagagaccuuu

SEQ ID NO: 43936 - RNA, 21 nt, RNAi
uuuuguguaugguucucugga

SEQ ID NO: 43937 - DNA, 21 bp, Homo sapiens
cacataccaagagacctacaa

SEQ ID NO: 43938 - RNA, 21 nt, RNAi
cauaccaagagaccuacaauu

SEQ ID NO: 43939 - RNA, 21 nt, RNAi
uuguaugguucucuggauguu

SEQ ID NO: 43940 - DNA, 21 bp, Homo sapiens
catttcaagactgttgaagca

SEQ ID NO: 43941 - RNA, 21 nt, RNAi
uuucaagacuguugaagcauu

SEQ ID NO: 43942 - RNA, 21 nt, RNAi
uuaaaguucugacaacuucgu

SEQ ID NO: 43943 - DNA, 21 bp, Homo sapiens
caagactgttgaagcataatc

SEQ ID NO: 43944 - RNA, 21 nt, RNAi
agacuguugaagcauaaucuu

SEQ ID NO: 43945 - RNA, 21 nt, RNAi
uuucugacaacuucguauuag

SEQ ID NO: 43946 - DNA, 21 bp, Homo sapiens
cagccagaggccaatgctcag

SEQ ID NO: 43947 - RNA, 21 nt, RNAi
gccagaggccaaugcucaguu

SEQ ID NO: 43948 - RNA, 21 nt, RNAi
uucggucuccgguuacgaguc

SEQ ID NO: 43949 - DNA, 21 bp, Homo sapiens
cagaggccaatgctcagagaa

SEQ ID NO: 43950 - RNA, 21 nt, RNAi
gaggccaaugcucagagaauu

SEQ ID NO: 43951 - RNA, 21 nt, RNAi
uucuccgguuacgagucucuu

SEQ ID NO: 43952 - DNA, 21 bp, Homo sapiens
caatgctcagagaagtacttg

SEQ ID NO: 43953 - RNA, 21 nt, RNAi
augcucagagaaguacuuguu

SEQ ID NO: 43954 - RNA, 21 nt, RNAi
uuuacgagucucuucaugaac

SEQ ID NO: 43955 - DNA, 21 bp, Homo sapiens
caaagaatcagctagcaaaca

SEQ ID NO: 43956 - RNA, 21 nt, RNAi
aagaaucagcuagcaaacauu

SEQ ID NO: 43957 - RNA, 21 nt, RNAi
uuuucuuagucgaucguuugu

SEQ ID NO: 43958 - DNA, 21 bp, Homo sapiens
cagctagcaaacagtcttagg

SEQ ID NO: 43959 - RNA, 21 nt, RNAi
gcuagcaaacagucuuagguu

SEQ ID NO: 43960 - RNA, 21 nt, RNAi
uucgaucguuugucagaaucc

SEQ ID NO: 43961 - DNA, 21 bp, Homo sapiens
caaacagtcttaggaatcgtg

SEQ ID NO: 43962 - RNA, 21 nt, RNAi
aacagucuuaggaaucguguu

SEQ ID NO: 43963 - RNA, 21 nt, RNAi
uuuugucagaauccuuagcac

SEQ ID NO: 43964 - DNA, 21 bp, Homo sapiens
cagtcttaggaatcgtgcagg

SEQ ID NO: 43965 - RNA, 21 nt, RNAi
gucuuaggaaucgugcagguu

SEQ ID NO: 43966 - RNA, 21 nt, RNAi
uucagaauccuuagcacgucc

SEQ ID NO: 43967 - DNA, 21 bp, Homo sapiens
catataacctgacaggaacat

SEQ ID NO: 43968 - RNA, 21 nt, RNAi
uauaaccugacaggaacauuu

SEQ ID NO: 43969 - RNA, 21 nt, RNAi
uuauauuggacuguccuugua

SEQ ID NO: 43970 - DNA, 21 bp, Homo sapiens
caggaacatgctactgaagtt

SEQ ID NO: 43971 - RNA, 21 nt, RNAi
ggaacaugcuacugaaguuuu

SEQ ID NO: 43972 - RNA, 21 nt, RNAi
uuccuuguacgaugacuucaa

SEQ ID NO: 43973 - DNA, 21 bp, Homo sapiens
caatctagaacgctacacaag

SEQ ID NO: 43974 - RNA, 21 nt, RNAi
aucuagaacgcuacacaaguu

SEQ ID NO: 43975 - RNA, 21 nt, RNAi
uuuagaucuugcgauguguuc

SEQ ID NO: 43976 - DNA, 21 bp, Homo sapiens
cagcaggtgtgccttaacctc

SEQ ID NO: 43977 - RNA, 21 nt, RNAi
gcaggugugccuuaaccucuu

SEQ ID NO: 43978 - RNA, 21 nt, RNAi
uucguccacacggaauuggag

SEQ ID NO: 43979 - DNA, 21 bp, Homo sapiens
cagaaagctccacatcaataa

SEQ ID NO: 43980 - RNA, 21 nt, RNAi
gaaagcuccacaucaauaauu

SEQ ID NO: 43981 - RNA, 21 nt, RNAi
uucuuucgagguguaguuauu

SEQ ID NO: 43982 - DNA, 21 bp, Homo sapiens
cacatcaataaacatgacact

SEQ ID NO: 43983 - RNA, 21 nt, RNAi
caucaauaaacaugacacuuu

SEQ ID NO: 43984 - RNA, 21 nt, RNAi
uuguaguuauuuguacuguga

SEQ ID NO: 43985 - DNA, 21 bp, Homo sapiens
catcaataaacatgacactct

SEQ ID NO: 43986 - RNA, 21 nt, RNAi
ucaauaaacaugacacucuuu

SEQ ID NO: 43987 - RNA, 21 nt, RNAi
uuaguuauuuguacugugaga

SEQ ID NO: 43988 - DNA, 21 bp, Homo sapiens
caataaacatgacactctgaa

SEQ ID NO: 43989 - RNA, 21 nt, RNAi
auaaacaugacacucugaauu

SEQ ID NO: 43990 - RNA, 21 nt, RNAi
uuuauuuguacugugagacuu

SEQ ID NO: 43991 - DNA, 21 bp, Homo sapiens
catgacactctgaagtgaaag

SEQ ID NO: 43992 - RNA, 21 nt, RNAi
ugacacucugaagugaaaguu

SEQ ID NO: 43993 - RNA, 21 nt, RNAi
uuacugugagacuucacuuuc

SEQ ID NO: 43994 - DNA, 21 bp, Homo sapiens
cactctgaagtgaaagtagcc

SEQ ID NO: 43995 - RNA, 21 nt, RNAi
cucugaagugaaaguagccuu

SEQ ID NO: 43996 - RNA, 21 nt, RNAi
uugagacuucacuuucaucgg

SEQ ID NO: 43997 - DNA, 21 bp, Homo sapiens
cacgagaattgtgctacttat

SEQ ID NO: 43998 - RNA, 21 nt, RNAi
cgagaauugugcuacuuauuu

SEQ ID NO: 43999 - RNA, 21 nt, RNAi
uugcucuuaacacgaugaaua

SEQ ID NO: 44000 - DNA, 21 bp, Homo sapiens
cataatctggaggcaaggttc

SEQ ID NO: 44001 - RNA, 21 nt, RNAi
uaaucuggaggcaagguucuu

SEQ ID NO: 44002 - RNA, 21 nt, RNAi
uuauuagaccuccguuccaag

SEQ ID NO: 44003 - DNA, 21 bp, Homo sapiens
cagcctgtgctaggcatggtg

SEQ ID NO: 44004 - RNA, 21 nt, RNAi
gccugugcuaggcaugguguu

SEQ ID NO: 44005 - RNA, 21 nt, RNAi
uucggacacgauccguaccac

SEQ ID NO: 44006 - DNA, 21 bp, Homo sapiens
catggtgtcttcacaggaggc

SEQ ID NO: 44007 - RNA, 21 nt, RNAi
uggugucuucacaggaggcuu

SEQ ID NO: 44008 - RNA, 21 nt, RNAi
uuaccacagaaguguccuccg

SEQ ID NO: 44009 - DNA, 21 bp, Homo sapiens
cacaggaggcaaatccagagc

SEQ ID NO: 44010 - RNA, 21 nt, RNAi
caggaggcaaauccagagcuu

SEQ ID NO: 44011 - RNA, 21 nt, RNAi
uuguccuccguuuaggucucg

SEQ ID NO: 44012 - DNA, 21 bp, Homo sapiens
caggaggcaaatccagagcct

SEQ ID NO: 44013 - RNA, 21 nt, RNAi
ggaggcaaauccagagccuuu

SEQ ID NO: 44014 - RNA, 21 nt, RNAi
uuccuccguuuaggucucgga

SEQ ID NO: 44015 - DNA, 21 bp, Homo sapiens
caaatccagagcctggctgtg

SEQ ID NO: 44016 - RNA, 21 nt, RNAi
aauccagagccuggcuguguu

SEQ ID NO: 44017 - RNA, 21 nt, RNAi
uuuuaggucucggaccgacac

SEQ ID NO: 44018 - DNA, 21 bp, Homo sapiens
cagttaaggagctgtgcaata

SEQ ID NO: 44019 - RNA, 21 nt, RNAi
guuaaggagcugugcaauauu

SEQ ID NO: 44020 - RNA, 21 nt, RNAi
uucaauuccucgacacguuau

SEQ ID NO: 44021 - DNA, 21 bp, Homo sapiens
caataaccttcctagtacctg

SEQ ID NO: 44022 - RNA, 21 nt, RNAi
auaaccuuccuaguaccuguu

SEQ ID NO: 44023 - RNA, 21 nt, RNAi
uuuauuggaaggaucauggac

SEQ ID NO: 44024 - DNA, 21 bp, Homo sapiens
cattcctttaggaatgctgtg

SEQ ID NO: 44025 - RNA, 21 nt, RNAi
uuccuuuaggaaugcuguguu

SEQ ID NO: 44026 - RNA, 21 nt, RNAi
uuaaggaaauccuuacgacac

SEQ ID NO: 44027 - DNA, 21 bp, Homo sapiens
cacgtgctctacctccattta

SEQ ID NO: 44028 - RNA, 21 nt, RNAi
cgugcucuaccuccauuuauu

SEQ ID NO: 44029 - RNA, 21 nt, RNAi
uugcacgagauggagguaaau

SEQ ID NO: 44030 - DNA, 21 bp, Homo sapiens
cagaagaggccatgtgtctca

SEQ ID NO: 44031 - RNA, 21 nt, RNAi
gaagaggccaugugucucauu

SEQ ID NO: 44032 - RNA, 21 nt, RNAi
uucuucuccgguacacagagu

SEQ ID NO: 44033 - DNA, 21 bp, Homo sapiens
catgtgtctcagagctgttaa

SEQ ID NO: 44034 - RNA, 21 nt, RNAi
ugugucucagagcuguuaauu

SEQ ID NO: 44035 - RNA, 21 nt, RNAi
uuacacagagucucgacaauu

SEQ ID NO: 44036 - DNA, 21 bp, Homo sapiens
cattggagtcatagcatgtgt

SEQ ID NO: 44037 - RNA, 21 nt, RNAi
uuggagucauagcauguguuu

SEQ ID NO: 44038 - RNA, 21 nt, RNAi
uuaaccucaguaucguacaca

SEQ ID NO: 44039 - DNA, 21 bp, Homo sapiens
catagcatgtgtgtaaacttt

SEQ ID NO: 44040 - RNA, 21 nt, RNAi
uagcauguguguaaacuuuuu

SEQ ID NO: 44041 - RNA, 21 nt, RNAi
uuaucguacacacauuugaaa

SEQ ID NO: 44042 - DNA, 21 bp, Homo sapiens
gatatctcagtggcggacgag

SEQ ID NO: 44043 - RNA, 21 nt, RNAi
uaucucaguggcggacgaguu

SEQ ID NO: 44044 - RNA, 21 nt, RNAi
uuauagagucaccgccugcuc

SEQ ID NO: 44045 - DNA, 21 bp, Homo sapiens
gagtgtccttggcgctgcctt

SEQ ID NO: 44046 - RNA, 21 nt, RNAi
guguccuuggcgcugccuuuu

SEQ ID NO: 44047 - RNA, 21 nt, RNAi
uucacaggaaccgcgacggaa

SEQ ID NO: 44048 - DNA, 21 bp, Homo sapiens
gataagaaacttcagtgaagg

SEQ ID NO: 44049 - RNA, 21 nt, RNAi
uaagaaacuucagugaagguu

SEQ ID NO: 44050 - RNA, 21 nt, RNAi
uuauucuuugaagucacuucc

SEQ ID NO: 44051 - DNA, 21 bp, Homo sapiens
gaggcatcatggaccgatcta

SEQ ID NO: 44052 - RNA, 21 nt, RNAi
ggcaucauggaccgaucuauu

SEQ ID NO: 44053 - RNA, 21 nt, RNAi
uuccguaguaccuggcuagau

SEQ ID NO: 44054 - DNA, 21 bp, Homo sapiens
gacctgttaaggctacagctc

SEQ ID NO: 44055 - RNA, 21 nt, RNAi
ccuguuaaggcuacagcucuu

SEQ ID NO: 44056 - RNA, 21 nt, RNAi
uuggacaauuccgaugucgag

SEQ ID NO: 44057 - DNA, 21 bp, Homo sapiens
gactcagcaatttccttgtca

SEQ ID NO: 44058 - RNA, 21 nt, RNAi
cucagcaauuuccuugucauu

SEQ ID NO: 44059 - RNA, 21 nt, RNAi
uugagucguuaaaggaacagu

SEQ ID NO: 44060 - DNA, 21 bp, Homo sapiens
gaatccattacctgtaaatag

SEQ ID NO: 44061 - RNA, 21 nt, RNAi
auccauuaccuguaaauaguu

SEQ ID NO: 44062 - RNA, 21 nt, RNAi
uuuagguaauggacauuuauc

SEQ ID NO: 44063 - DNA, 21 bp, Homo sapiens
gaatcagaagcagaagcaatt

SEQ ID NO: 44064 - RNA, 21 nt, RNAi
aucagaagcagaagcaauuuu

SEQ ID NO: 44065 - RNA, 21 nt, RNAi
uuuagucuucgucuucguuaa

SEQ ID NO: 44066 - DNA, 21 bp, Homo sapiens
gaagcagaagcaattgcaggc

SEQ ID NO: 44067 - RNA, 21 nt, RNAi
agcagaagcaauugcaggcuu

SEQ ID NO: 44068 - RNA, 21 nt, RNAi
uuucgucuucguuaacguccg

SEQ ID NO: 44069 - DNA, 21 bp, Homo sapiens
gaagcaattgcaggcaaccag

SEQ ID NO: 44070 - RNA, 21 nt, RNAi
agcaauugcaggcaaccaguu

SEQ ID NO: 44071 - RNA, 21 nt, RNAi
uuucguuaacguccguugguc

SEQ ID NO: 44072 - DNA, 21 bp, Homo sapiens
gaagactttgaaattggtcgc

SEQ ID NO: 44073 - RNA, 21 nt, RNAi
agacuuugaaauuggucgcuu

SEQ ID NO: 44074 - RNA, 21 nt, RNAi
uuucugaaacuuuaaccagcg

SEQ ID NO: 44075 - DNA, 21 bp, Homo sapiens
gagaaagccggagtggagcat

SEQ ID NO: 44076 - RNA, 21 nt, RNAi
gaaagccggaguggagcauuu

SEQ ID NO: 44077 - RNA, 21 nt, RNAi
uucuuucggccucaccucgua

SEQ ID NO: 44078 - DNA, 21 bp, Homo sapiens
gaaagccggagtggagcatca

SEQ ID NO: 44079 - RNA, 21 nt, RNAi
aagccggaguggagcaucauu

SEQ ID NO: 44080 - RNA, 21 nt, RNAi
uuuucggccucaccucguagu

SEQ ID NO: 44081 - DNA, 21 bp, Homo sapiens
gagtggagcatcagctcagaa

SEQ ID NO: 44082 - RNA, 21 nt, RNAi
guggagcaucagcucagaauu

SEQ ID NO: 44083 - RNA, 21 nt, RNAi
uucaccucguagucgagucuu

SEQ ID NO: 44084 - DNA, 21 bp, Homo sapiens
gagcatcagctcagaagagaa

SEQ ID NO: 44085 - RNA, 21 nt, RNAi
gcaucagcucagaagagaauu

SEQ ID NO: 44086 - RNA, 21 nt, RNAi
uucguagucgagucuucucuu

SEQ ID NO: 44087 - DNA, 21 bp, Homo sapiens
gaagagaagtagaaatacagt

SEQ ID NO: 44088 - RNA, 21 nt, RNAi
agagaaguagaaauacaguuu

SEQ ID NO: 44089 - RNA, 21 nt, RNAi
uuucucuucaucuuuauguca

SEQ ID NO: 44090 - DNA, 21 bp, Homo sapiens
gactgtatggttatttccatg

SEQ ID NO: 44091 - RNA, 21 nt, RNAi
cuguaugguuauuuccauguu

SEQ ID NO: 44092 - RNA, 21 nt, RNAi
uugacauaccaauaaagguac

SEQ ID NO: 44093 - DNA, 21 bp, Homo sapiens
gatgctaccagagtctaccta

SEQ ID NO: 44094 - RNA, 21 nt, RNAi
ugcuaccagagucuaccuauu

SEQ ID NO: 44095 - RNA, 21 nt, RNAi
uuacgauggucucagauggau

SEQ ID NO: 44096 - DNA, 21 bp, Homo sapiens
gagtctacctaattctggaat

SEQ ID NO: 44097 - RNA, 21 nt, RNAi
gucuaccuaauucuggaauuu

SEQ ID NO: 44098 - RNA, 21 nt, RNAi
uucagauggauuaagaccuua

SEQ ID NO: 44099 - DNA, 21 bp, Homo sapiens
gaatatgcaccacttggaaca

SEQ ID NO: 44100 - RNA, 21 nt, RNAi
auaugcaccacuuggaacauu

SEQ ID NO: 44101 - RNA, 21 nt, RNAi
uuuauacguggugaaccuugu

SEQ ID NO: 44102 - DNA, 21 bp, Homo sapiens
gaacagtttatagagaacttc

SEQ ID NO: 44103 - RNA, 21 nt, RNAi
acaguuuauagagaacuucuu

SEQ ID NO: 44104 - RNA, 21 nt, RNAi
uuugucaaauaucucuugaag

SEQ ID NO: 44105 - DNA, 21 bp, Homo sapiens
gagaacttcagaaactttcaa

SEQ ID NO: 44106 - RNA, 21 nt, RNAi
gaacuucagaaacuuucaauu

SEQ ID NO: 44107 - RNA, 21 nt, RNAi
uucuugaagucuuugaaaguu

SEQ ID NO: 44108 - DNA, 21 bp, Homo sapiens
gaacttcagaaactttcaaag

SEQ ID NO: 44109 - RNA, 21 nt, RNAi
acuucagaaacuuucaaaguu

SEQ ID NO: 44110 - RNA, 21 nt, RNAi
uuugaagucuuugaaaguuuc

SEQ ID NO: 44111 - DNA, 21 bp, Homo sapiens
gatgagcagagaactgctact

SEQ ID NO: 44112 - RNA, 21 nt, RNAi
ugagcagagaacugcuacuuu

SEQ ID NO: 44113 - RNA, 21 nt, RNAi
uuacucgucucuugacgauga

SEQ ID NO: 44114 - DNA, 21 bp, Homo sapiens
gagcagagaactgctacttat

SEQ ID NO: 44115 - RNA, 21 nt, RNAi
gcagagaacugcuacuuauuu

SEQ ID NO: 44116 - RNA, 21 nt, RNAi
uucgucucuugacgaugaaua

SEQ ID NO: 44117 - DNA, 21 bp, Homo sapiens
gagaactgctacttatataac

SEQ ID NO: 44118 - RNA, 21 nt, RNAi
gaacugcuacuuauauaacuu

SEQ ID NO: 44119 - RNA, 21 nt, RNAi
uucuugacgaugaauauauug

SEQ ID NO: 44120 - DNA, 21 bp, Homo sapiens
gaactgctacttatataacag

SEQ ID NO: 44121 - RNA, 21 nt, RNAi
acugcuacuuauauaacaguu

SEQ ID NO: 44122 - RNA, 21 nt, RNAi
uuugacgaugaauauauuguc

SEQ ID NO: 44123 - DNA, 21 bp, Homo sapiens
gaagagagttattcatagaga

SEQ ID NO: 44124 - RNA, 21 nt, RNAi
agagaguuauucauagagauu

SEQ ID NO: 44125 - RNA, 21 nt, RNAi
uuucucucaauaaguaucucu

SEQ ID NO: 44126 - DNA, 21 bp, Homo sapiens
gagagttattcatagagacat

SEQ ID NO: 44127 - RNA, 21 nt, RNAi
gaguuauucauagagacauuu

SEQ ID NO: 44128 - RNA, 21 nt, RNAi
uucucaauaaguaucucugua

SEQ ID NO: 44129 - DNA, 21 bp, Homo sapiens
gagacattaagccagagaact

SEQ ID NO: 44130 - RNA, 21 nt, RNAi
gacauuaagccagagaacuuu

SEQ ID NO: 44131 - RNA, 21 nt, RNAi
uucuguaauucggucucuuga

SEQ ID NO: 44132 - DNA, 21 bp, Homo sapiens
gacattaagccagagaactta

SEQ ID NO: 44133 - RNA, 21 nt, RNAi
cauuaagccagagaacuuauu

SEQ ID NO: 44134 - RNA, 21 nt, RNAi
uuguaauucggucucuugaau

SEQ ID NO: 44135 - DNA, 21 bp, Homo sapiens
gagaacttacttcttggatca

SEQ ID NO: 44136 - RNA, 21 nt, RNAi
gaacuuacuucuuggaucauu

SEQ ID NO: 44137 - RNA, 21 nt, RNAi
uucuugaaugaagaaccuagu

SEQ ID NO: 44138 - DNA, 21 bp, Homo sapiens
gaacttacttcttggatcagc

SEQ ID NO: 44139 - RNA, 21 nt, RNAi
acuuacuucuuggaucagcuu

SEQ ID NO: 44140 - RNA, 21 nt, RNAi
uuugaaugaagaaccuagucg

SEQ ID NO: 44141 - DNA, 21 bp, Homo sapiens
gaggaccactctctgtggcac

SEQ ID NO: 44142 - RNA, 21 nt, RNAi
ggaccacucucuguggcacuu

SEQ ID NO: 44143 - RNA, 21 nt, RNAi
uuccuggugagagacaccgug

SEQ ID NO: 44144 - DNA, 21 bp, Homo sapiens
gaaatgattgaaggtcggatg

SEQ ID NO: 44145 - RNA, 21 nt, RNAi
aaugauugaaggucggauguu

SEQ ID NO: 44146 - RNA, 21 nt, RNAi
uuuuacuaacuuccagccuac

SEQ ID NO: 44147 - DNA, 21 bp, Homo sapiens
gattgaaggtcggatgcatga

SEQ ID NO: 44148 - RNA, 21 nt, RNAi
uugaaggucggaugcaugauu

SEQ ID NO: 44149 - RNA, 21 nt, RNAi
uuaacuuccagccuacguacu

SEQ ID NO: 44150 - DNA, 21 bp, Homo sapiens
gaaggtcggatgcatgatgag

SEQ ID NO: 44151 - RNA, 21 nt, RNAi
aggucggaugcaugaugaguu

SEQ ID NO: 44152 - RNA, 21 nt, RNAi
uuuccagccuacguacuacuc

SEQ ID NO: 44153 - DNA, 21 bp, Homo sapiens
gatgcatgatgagaaggtgga

SEQ ID NO: 44154 - RNA, 21 nt, RNAi
ugcaugaugagaagguggauu

SEQ ID NO: 44155 - RNA, 21 nt, RNAi
uuacguacuacucuuccaccu

SEQ ID NO: 44156 - DNA, 21 bp, Homo sapiens
gatgagaaggtggatctctgg

SEQ ID NO: 44157 - RNA, 21 nt, RNAi
ugagaagguggaucucugguu

SEQ ID NO: 44158 - RNA, 21 nt, RNAi
uuacucuuccaccuagagacc

SEQ ID NO: 44159 - DNA, 21 bp, Homo sapiens
gagaaggtggatctctggagc

SEQ ID NO: 44160 - RNA, 21 nt, RNAi
gaagguggaucucuggagcuu

SEQ ID NO: 44161 - RNA, 21 nt, RNAi
uucuuccaccuagagaccucg

SEQ ID NO: 44162 - DNA, 21 bp, Homo sapiens
gaaggtggatctctggagcct

SEQ ID NO: 44163 - RNA, 21 nt, RNAi
agguggaucucuggagccuuu

SEQ ID NO: 44164 - RNA, 21 nt, RNAi
uuuccaccuagagaccucgga

SEQ ID NO: 44165 - DNA, 21 bp, Homo sapiens
gatctctggagccttggagtt

SEQ ID NO: 44166 - RNA, 21 nt, RNAi
ucucuggagccuuggaguuuu

SEQ ID NO: 44167 - RNA, 21 nt, RNAi
uuagagaccucggaaccucaa

SEQ ID NO: 44168 - DNA, 21 bp, Homo sapiens
gagccttggagttctttgcta

SEQ ID NO: 44169 - RNA, 21 nt, RNAi
gccuuggaguucuuugcuauu

SEQ ID NO: 44170 - RNA, 21 nt, RNAi
uucggaaccucaagaaacgau

SEQ ID NO: 44171 - DNA, 21 bp, Homo sapiens
gaggcaaacacataccaagag

SEQ ID NO: 44172 - RNA, 21 nt, RNAi
ggcaaacacauaccaagaguu

SEQ ID NO: 44173 - RNA, 21 nt, RNAi
uuccguuuguguaugguucuc

SEQ ID NO: 44174 - DNA, 21 bp, Homo sapiens
gacctcatttcaagactgttg

SEQ ID NO: 44175 - RNA, 21 nt, RNAi
ccucauuucaagacuguuguu

SEQ ID NO: 44176 - RNA, 21 nt, RNAi
uuggaguaaaguucugacaac

SEQ ID NO: 44177 - DNA, 21 bp, Homo sapiens
gaggccaatgctcagagaagt

SEQ ID NO: 44178 - RNA, 21 nt, RNAi
ggccaaugcucagagaaguuu

SEQ ID NO: 44179 - RNA, 21 nt, RNAi
uuccgguuacgagucucuuca

SEQ ID NO: 44180 - DNA, 21 bp, Homo sapiens
gatcacagcaaattcatcaaa

SEQ ID NO: 44181 - RNA, 21 nt, RNAi
ucacagcaaauucaucaaauu

SEQ ID NO: 44182 - RNA, 21 nt, RNAi
uuagugucguuuaaguaguuu

SEQ ID NO: 44183 - DNA, 21 bp, Homo sapiens
gaatcagctagcaaacagtct

SEQ ID NO: 44184 - RNA, 21 nt, RNAi
aucagcuagcaaacagucuuu

SEQ ID NO: 44185 - RNA, 21 nt, RNAi
uuuagucgaucguuugucaga

SEQ ID NO: 44186 - DNA, 21 bp, Homo sapiens
gacaggaacatgctactgaag

SEQ ID NO: 44187 - RNA, 21 nt, RNAi
caggaacaugcuacugaaguu

SEQ ID NO: 44188 - RNA, 21 nt, RNAi
uuguccuuguacgaugacuuc

SEQ ID NO: 44189 - DNA, 21 bp, Homo sapiens
gaacatgctactgaagtttat

SEQ ID NO: 44190 - RNA, 21 nt, RNAi
acaugcuacugaaguuuauuu

SEQ ID NO: 44191 - RNA, 21 nt, RNAi
uuuguacgaugacuucaaaua

SEQ ID NO: 44192 - DNA, 21 bp, Homo sapiens
gaacgctacacaagaaatatt

SEQ ID NO: 44193 - RNA, 21 nt, RNAi
acgcuacacaagaaauauuuu

SEQ ID NO: 44194 - RNA, 21 nt, RNAi
uuugcgauguguucuuuauaa

SEQ ID NO: 44195 - DNA, 21 bp, Homo sapiens
gaaagctccacatcaataaac

SEQ ID NO: 44196 - RNA, 21 nt, RNAi
aagcuccacaucaauaaacuu

SEQ ID NO: 44197 - RNA, 21 nt, RNAi
uuuucgagguguaguuauuug

SEQ ID NO: 44198 - DNA, 21 bp, Homo sapiens
gacactctgaagtgaaagtag

SEQ ID NO: 44199 - RNA, 21 nt, RNAi
cacucugaagugaaaguaguu

SEQ ID NO: 44200 - RNA, 21 nt, RNAi
uugugagacuucacuuucauc

SEQ ID NO: 44201 - DNA, 21 bp, Homo sapiens
gaagtgaaagtagccacgaga

SEQ ID NO: 44202 - RNA, 21 nt, RNAi
agugaaaguagccacgagauu

SEQ ID NO: 44203 - RNA, 21 nt, RNAi
uuucacuuucaucggugcucu

SEQ ID NO: 44204 - DNA, 21 bp, Homo sapiens
gaaagtagccacgagaattgt

SEQ ID NO: 44205 - RNA, 21 nt, RNAi
aaguagccacgagaauuguuu

SEQ ID NO: 44206 - RNA, 21 nt, RNAi
uuuucaucggugcucuuaaca

SEQ ID NO: 44207 - DNA, 21 bp, Homo sapiens
gagaattgtgctacttatact

SEQ ID NO: 44208 - RNA, 21 nt, RNAi
gaauugugcuacuuauacuuu

SEQ ID NO: 44209 - RNA, 21 nt, RNAi
uucuuaacacgaugaauauga

SEQ ID NO: 44210 - DNA, 21 bp, Homo sapiens
gaattgtgctacttatactgg

SEQ ID NO: 44211 - RNA, 21 nt, RNAi
auugugcuacuuauacugguu

SEQ ID NO: 44212 - RNA, 21 nt, RNAi
uuuaacacgaugaauaugacc

SEQ ID NO: 44213 - DNA, 21 bp, Homo sapiens
gaggcaaggttcgactgcagc

SEQ ID NO: 44214 - RNA, 21 nt, RNAi
ggcaagguucgacugcagcuu

SEQ ID NO: 44215 - RNA, 21 nt, RNAi
uuccguuccaagcugacgucg

SEQ ID NO: 44216 - DNA, 21 bp, Homo sapiens
gaggcaaatccagagcctggc

SEQ ID NO: 44217 - RNA, 21 nt, RNAi
ggcaaauccagagccuggcuu

SEQ ID NO: 44218 - RNA, 21 nt, RNAi
uuccguuuaggucucggaccg

SEQ ID NO: 44219 - DNA, 21 bp, Homo sapiens
gatcagttaaggagctgtgca

SEQ ID NO: 44220 - RNA, 21 nt, RNAi
ucaguuaaggagcugugcauu

SEQ ID NO: 44221 - RNA, 21 nt, RNAi
uuagucaauuccucgacacgu

SEQ ID NO: 44222 - DNA, 21 bp, Homo sapiens
gagctgtgcaataaccttcct

SEQ ID NO: 44223 - RNA, 21 nt, RNAi
gcugugcaauaaccuuccuuu

SEQ ID NO: 44224 - RNA, 21 nt, RNAi
uucgacacguuauuggaagga

SEQ ID NO: 44225 - DNA, 21 bp, Homo sapiens
gagtgagtgtgtaacttattg

SEQ ID NO: 44226 - RNA, 21 nt, RNAi
gugaguguguaacuuauuguu

SEQ ID NO: 44227 - RNA, 21 nt, RNAi
uucacucacacauugaauaac

SEQ ID NO: 44228 - DNA, 21 bp, Homo sapiens
gaagcctggtaaagctgttgg

SEQ ID NO: 44229 - RNA, 21 nt, RNAi
agccugguaaagcuguugguu

SEQ ID NO: 44230 - RNA, 21 nt, RNAi
uuucggaccauuucgacaacc

SEQ ID NO: 44231 - DNA, 21 bp, Homo sapiens
gaatgctgtgtgtctgtccgg

SEQ ID NO: 44232 - RNA, 21 nt, RNAi
augcugugugucuguccgguu

SEQ ID NO: 44233 - RNA, 21 nt, RNAi
uuuacgacacacagacaggcc

SEQ ID NO: 44234 - DNA, 21 bp, Homo sapiens
gaacacgtgctctacctccat

SEQ ID NO: 44235 - RNA, 21 nt, RNAi
acacgugcucuaccuccauuu

SEQ ID NO: 44236 - RNA, 21 nt, RNAi
uuugugcacgagauggaggua

SEQ ID NO: 44237 - DNA, 21 bp, Homo sapiens
gatacagaagaggccatgtgt

SEQ ID NO: 44238 - RNA, 21 nt, RNAi
uacagaagaggccauguguuu

SEQ ID NO: 44239 - RNA, 21 nt, RNAi
uuaugucuucuccgguacaca

SEQ ID NO: 44240 - DNA, 21 bp, Homo sapiens
gaagaggccatgtgtctcaga

SEQ ID NO: 44241 - RNA, 21 nt, RNAi
agaggccaugugucucagauu

SEQ ID NO: 44242 - RNA, 21 nt, RNAi
uuucuccgguacacagagucu

SEQ ID NO: 44243 - DNA, 21 bp, Homo sapiens
gaggccatgtgtctcagagct

SEQ ID NO: 44244 - RNA, 21 nt, RNAi
ggccaugugucucagagcuuu

SEQ ID NO: 44245 - RNA, 21 nt, RNAi
uuccgguacacagagucucga

SEQ ID NO: 44246 - DNA, 21 bp, Homo sapiens
gagtcatagcatgtgtgtaaa

SEQ ID NO: 44247 - RNA, 21 nt, RNAi
gucauagcauguguguaaauu

SEQ ID NO: 44248 - RNA, 21 nt, RNAi
uucaguaucguacacacauuu

SEQ ID NO: 44249 - DNA, 21 bp, Homo sapiens
tatctcagtggcggacgagga

SEQ ID NO: 44250 - RNA, 21 nt, RNAi
ucucaguggcggacgaggauu

SEQ ID NO: 44251 - RNA, 21 nt, RNAi
uuagagucaccgccugcuccu

SEQ ID NO: 44252 - DNA, 21 bp, Homo sapiens
taggatactgcttgttactta

SEQ ID NO: 44253 - RNA, 21 nt, RNAi
ggauacugcuuguuacuuauu

SEQ ID NO: 44254 - RNA, 21 nt, RNAi
uuccuaugacgaacaaugaau

SEQ ID NO: 44255 - DNA, 21 bp, Homo sapiens
taagaaacttcagtgaaggcc

SEQ ID NO: 44256 - RNA, 21 nt, RNAi
agaaacuucagugaaggccuu

SEQ ID NO: 44257 - RNA, 21 nt, RNAi
uuucuuugaagucacuuccgg

SEQ ID NO: 44258 - DNA, 21 bp, Homo sapiens
taaggctacagctccagttgg

SEQ ID NO: 44259 - RNA, 21 nt, RNAi
aggcuacagcuccaguugguu

SEQ ID NO: 44260 - RNA, 21 nt, RNAi
uuuccgaugucgaggucaacc

SEQ ID NO: 44261 - DNA, 21 bp, Homo sapiens
tacagctccagttggaggtcc

SEQ ID NO: 44262 - RNA, 21 nt, RNAi
cagcuccaguuggagguccuu

SEQ ID NO: 44263 - RNA, 21 nt, RNAi
uugucgaggucaaccuccagg

SEQ ID NO: 44264 - DNA, 21 bp, Homo sapiens
tacctgtaaatagtggccagg

SEQ ID NO: 44265 - RNA, 21 nt, RNAi
ccuguaaauaguggccagguu

SEQ ID NO: 44266 - RNA, 21 nt, RNAi
uuggacauuuaucaccggucc

SEQ ID NO: 44267 - DNA, 21 bp, Homo sapiens
taaatagtggccaggctcagc

SEQ ID NO: 44268 - RNA, 21 nt, RNAi
aauaguggccaggcucagcuu

SEQ ID NO: 44269 - RNA, 21 nt, RNAi
uuuuaucaccgguccgagucg

SEQ ID NO: 44270 - DNA, 21 bp, Homo sapiens
tacctcatcctgtctccaggc

SEQ ID NO: 44271 - RNA, 21 nt, RNAi
ccucauccugucuccaggcuu

SEQ ID NO: 44272 - RNA, 21 nt, RNAi
uuggaguaggacagagguccg

SEQ ID NO: 44273 - DNA, 21 bp, Homo sapiens
taatcctgaggaggaactggc

SEQ ID NO: 44274 - RNA, 21 nt, RNAi
auccugaggaggaacuggcuu

SEQ ID NO: 44275 - RNA, 21 nt, RNAi
uuuaggacuccuccuugaccg

SEQ ID NO: 44276 - DNA, 21 bp, Homo sapiens
tattctggctcttaaagtgtt

SEQ ID NO: 44277 - RNA, 21 nt, RNAi
uucuggcucuuaaaguguuuu

SEQ ID NO: 44278 - RNA, 21 nt, RNAi
uuaagaccgagaauuucacaa

SEQ ID NO: 44279 - DNA, 21 bp, Homo sapiens
tatttaaagctcagctggaga

SEQ ID NO: 44280 - RNA, 21 nt, RNAi
uuuaaagcucagcuggagauu

SEQ ID NO: 44281 - RNA, 21 nt, RNAi
uuaaauuucgagucgaccucu

SEQ ID NO: 44282 - DNA, 21 bp, Homo sapiens
taaagctcagctggagaaagc

SEQ ID NO: 44283 - RNA, 21 nt, RNAi
aagcucagcuggagaaagcuu

SEQ ID NO: 44284 - RNA, 21 nt, RNAi
uuuucgagucgaccucuuucg

SEQ ID NO: 44285 - DNA, 21 bp, Homo sapiens
tagactgtatggttatttcca

SEQ ID NO: 44286 - RNA, 21 nt, RNAi
gacuguaugguuauuuccauu

SEQ ID NO: 44287 - RNA, 21 nt, RNAi
uucugacauaccaauaaaggu

SEQ ID NO: 44288 - DNA, 21 bp, Homo sapiens
tatggttatttccatgatgct

SEQ ID NO: 44289 - RNA, 21 nt, RNAi
ugguuauuuccaugaugcuuu

SEQ ID NO: 44290 - RNA, 21 nt, RNAi
uuaccaauaaagguacuacga

SEQ ID NO: 44291 - DNA, 21 bp, Homo sapiens
tatttccatgatgctaccaga

SEQ ID NO: 44292 - RNA, 21 nt, RNAi
uuuccaugaugcuaccagauu

SEQ ID NO: 44293 - RNA, 21 nt, RNAi
uuaaagguacuacgauggucu

SEQ ID NO: 44294 - DNA, 21 bp, Homo sapiens
taccagagtctacctaattct

SEQ ID NO: 44295 - RNA, 21 nt, RNAi
ccagagucuaccuaauucuuu

SEQ ID NO: 44296 - RNA, 21 nt, RNAi
uuggucucagauggauuaaga

SEQ ID NO: 44297 - DNA, 21 bp, Homo sapiens
tacctaattctggaatatgca

SEQ ID NO: 44298 - RNA, 21 nt, RNAi
ccuaauucuggaauaugcauu

SEQ ID NO: 44299 - RNA, 21 nt, RNAi
uuggauuaagaccuuauacgu

SEQ ID NO: 44300 - DNA, 21 bp, Homo sapiens
taattctggaatatgcaccac

SEQ ID NO: 44301 - RNA, 21 nt, RNAi
auucuggaauaugcaccacuu

SEQ ID NO: 44302 - RNA, 21 nt, RNAi
uuuaagaccuuauacguggug

SEQ ID NO: 44303 - DNA, 21 bp, Homo sapiens
tatgcaccacttggaacagtt

SEQ ID NO: 44304 - RNA, 21 nt, RNAi
ugcaccacuuggaacaguuuu

SEQ ID NO: 44305 - RNA, 21 nt, RNAi
uuacguggugaaccuugucaa

SEQ ID NO: 44306 - DNA, 21 bp, Homo sapiens
tagagaacttcagaaactttc

SEQ ID NO: 44307 - RNA, 21 nt, RNAi
gagaacuucagaaacuuucuu

SEQ ID NO: 44308 - RNA, 21 nt, RNAi
uucucuugaagucuuugaaag

SEQ ID NO: 44309 - DNA, 21 bp, Homo sapiens
tataacagaattggcaaatgc

SEQ ID NO: 44310 - RNA, 21 nt, RNAi
uaacagaauuggcaaaugcuu

SEQ ID NO: 44311 - RNA, 21 nt, RNAi
uuauugucuuaaccguuuacg

SEQ ID NO: 44312 - DNA, 21 bp, Homo sapiens
tactgtcattcgaagagagtt

SEQ ID NO: 44313 - RNA, 21 nt, RNAi
cugucauucgaagagaguuuu

SEQ ID NO: 44314 - RNA, 21 nt, RNAi
uugacaguaagcuucucucaa

SEQ ID NO: 44315 - DNA, 21 bp, Homo sapiens
tattcatagagacattaagcc

SEQ ID NO: 44316 - RNA, 21 nt, RNAi
uucauagagacauuaagccuu

SEQ ID NO: 44317 - RNA, 21 nt, RNAi
uuaaguaucucuguaauucgg

SEQ ID NO: 44318 - DNA, 21 bp, Homo sapiens
tagagacattaagccagagaa

SEQ ID NO: 44319 - RNA, 21 nt, RNAi
gagacauuaagccagagaauu

SEQ ID NO: 44320 - RNA, 21 nt, RNAi
uucucuguaauucggucucuu

SEQ ID NO: 44321 - DNA, 21 bp, Homo sapiens
taagccagagaacttacttct

SEQ ID NO: 44322 - RNA, 21 nt, RNAi
agccagagaacuuacuucuuu

SEQ ID NO: 44323 - RNA, 21 nt, RNAi
uuucggucucuugaaugaaga

SEQ ID NO: 44324 - DNA, 21 bp, Homo sapiens
tacttcttggatcagctggag

SEQ ID NO: 44325 - RNA, 21 nt, RNAi
cuucuuggaucagcuggaguu

SEQ ID NO: 44326 - RNA, 21 nt, RNAi
uugaagaaccuagucgaccuc

SEQ ID NO: 44327 - DNA, 21 bp, Homo sapiens
tacatgctccatcttccagga

SEQ ID NO: 44328 - RNA, 21 nt, RNAi
caugcuccaucuuccaggauu

SEQ ID NO: 44329 - RNA, 21 nt, RNAi
uuguacgagguagaagguccu

SEQ ID NO: 44330 - DNA, 21 bp, Homo sapiens
tagcaaacagtcttaggaatc

SEQ ID NO: 44331 - RNA, 21 nt, RNAi
gcaaacagucuuaggaaucuu

SEQ ID NO: 44332 - RNA, 21 nt, RNAi
uucguuugucagaauccuuag

SEQ ID NO: 44333 - DNA, 21 bp, Homo sapiens
tataacctgacaggaacatgc

SEQ ID NO: 44334 - RNA, 21 nt, RNAi
uaaccugacaggaacaugcuu

SEQ ID NO: 44335 - RNA, 21 nt, RNAi
uuauuggacuguccuuguacg

SEQ ID NO: 44336 - DNA, 21 bp, Homo sapiens
taacctgacaggaacatgcta

SEQ ID NO: 44337 - RNA, 21 nt, RNAi
accugacaggaacaugcuauu

SEQ ID NO: 44338 - RNA, 21 nt, RNAi
uuuggacuguccuuguacgau

SEQ ID NO: 44339 - DNA, 21 bp, Homo sapiens
tagaacgctacacaagaaata

SEQ ID NO: 44340 - RNA, 21 nt, RNAi
gaacgcuacacaagaaauauu

SEQ ID NO: 44341 - RNA, 21 nt, RNAi
uucuugcgauguguucuuuau

SEQ ID NO: 44342 - DNA, 21 bp, Homo sapiens
tactcagcaggtgtgccttaa

SEQ ID NO: 44343 - RNA, 21 nt, RNAi
cucagcaggugugccuuaauu

SEQ ID NO: 44344 - RNA, 21 nt, RNAi
uugagucguccacacggaauu

SEQ ID NO: 44345 - DNA, 21 bp, Homo sapiens
tattcagaaagctccacatca

SEQ ID NO: 44346 - RNA, 21 nt, RNAi
uucagaaagcuccacaucauu

SEQ ID NO: 44347 - RNA, 21 nt, RNAi
uuaagucuuucgagguguagu

SEQ ID NO: 44348 - DNA, 21 bp, Homo sapiens
taaacatgacactctgaagtg

SEQ ID NO: 44349 - RNA, 21 nt, RNAi
aacaugacacucugaaguguu

SEQ ID NO: 44350 - RNA, 21 nt, RNAi
uuuuguacugugagacuucac

SEQ ID NO: 44351 - DNA, 21 bp, Homo sapiens
tagccacgagaattgtgctac

SEQ ID NO: 44352 - RNA, 21 nt, RNAi
gccacgagaauugugcuacuu

SEQ ID NO: 44353 - RNA, 21 nt, RNAi
uucggugcucuuaacacgaug

SEQ ID NO: 44354 - DNA, 21 bp, Homo sapiens
tatactggttcataatctgga

SEQ ID NO: 44355 - RNA, 21 nt, RNAi
uacugguucauaaucuggauu

SEQ ID NO: 44356 - RNA, 21 nt, RNAi
uuaugaccaaguauuagaccu

SEQ ID NO: 44357 - DNA, 21 bp, Homo sapiens
tactggttcataatctggagg

SEQ ID NO: 44358 - RNA, 21 nt, RNAi
cugguucauaaucuggagguu

SEQ ID NO: 44359 - RNA, 21 nt, RNAi
uugaccaaguauuagaccucc

SEQ ID NO: 44360 - DNA, 21 bp, Homo sapiens
taatctggaggcaaggttcga

SEQ ID NO: 44361 - RNA, 21 nt, RNAi
aucuggaggcaagguucgauu

SEQ ID NO: 44362 - RNA, 21 nt, RNAi
uuuagaccuccguuccaagcu

SEQ ID NO: 44363 - DNA, 21 bp, Homo sapiens
taggcatggtgtcttcacagg

SEQ ID NO: 44364 - RNA, 21 nt, RNAi
ggcauggugucuucacagguu

SEQ ID NO: 44365 - RNA, 21 nt, RNAi
uuccguaccacagaagugucc

SEQ ID NO: 44366 - DNA, 21 bp, Homo sapiens
taaggagctgtgcaataacct

SEQ ID NO: 44367 - RNA, 21 nt, RNAi
aggagcugugcaauaaccuuu

SEQ ID NO: 44368 - RNA, 21 nt, RNAi
uuuccucgacacguuauugga

SEQ ID NO: 44369 - DNA, 21 bp, Homo sapiens
taaccttcctagtacctgagt

SEQ ID NO: 44370 - RNA, 21 nt, RNAi
accuuccuaguaccugaguuu

SEQ ID NO: 44371 - RNA, 21 nt, RNAi
uuuggaaggaucauggacuca

SEQ ID NO: 44372 - DNA, 21 bp, Homo sapiens
tagtacctgagtgagtgtgta

SEQ ID NO: 44373 - RNA, 21 nt, RNAi
guaccugagugaguguguauu

SEQ ID NO: 44374 - RNA, 21 nt, RNAi
uucauggacucacucacacau

SEQ ID NO: 44375 - DNA, 21 bp, Homo sapiens
tacctgagtgagtgtgtaact

SEQ ID NO: 44376 - RNA, 21 nt, RNAi
ccugagugaguguguaacuuu

SEQ ID NO: 44377 - RNA, 21 nt, RNAi
uuggacucacucacacauuga

SEQ ID NO: 44378 - DNA, 21 bp, Homo sapiens
taaagctgttggaatgagtat

SEQ ID NO: 44379 - RNA, 21 nt, RNAi
aagcuguuggaaugaguauuu

SEQ ID NO: 44380 - RNA, 21 nt, RNAi
uuuucgacaaccuuacucaua

SEQ ID NO: 44381 - DNA, 21 bp, Homo sapiens
taggaatgctgtgtgtctgtc

SEQ ID NO: 44382 - RNA, 21 nt, RNAi
ggaaugcugugugucugucuu

SEQ ID NO: 44383 - RNA, 21 nt, RNAi
uuccuuacgacacacagacag

SEQ ID NO: 44384 - DNA, 21 bp, Homo sapiens
tagtcctccttaaccacttat

SEQ ID NO: 44385 - RNA, 21 nt, RNAi
guccuccuuaaccacuuauuu

SEQ ID NO: 44386 - RNA, 21 nt, RNAi
uucaggaggaauuggugaaua

SEQ ID NO: 44387 - DNA, 21 bp, Homo sapiens
taggaacacgtgctctacctc

SEQ ID NO: 44388 - RNA, 21 nt, RNAi
ggaacacgugcucuaccucuu

SEQ ID NO: 44389 - RNA, 21 nt, RNAi
uuccuugugcacgagauggag

SEQ ID NO: 44390 - DNA, 21 bp, Homo sapiens
tacagaagaggccatgtgtct

SEQ ID NO: 44391 - RNA, 21 nt, RNAi
cagaagaggccaugugucuuu

SEQ ID NO: 44392 - RNA, 21 nt, RNAi
uugucuucuccgguacacaga

SEQ ID NO: 44393 - DNA, 21 bp, Homo sapiens
aacacataccaagagacctac

SEQ ID NO: 44394 - RNA, 21 nt, RNAi
cacauaccaagagaccuacuu

SEQ ID NO: 44395 - RNA, 21 nt, RNAi
uuguguaugguucucuggaug

SEQ ID NO: 44396 - DNA, 21 bp, Homo sapiens
aagactgttgaagcataatcc

SEQ ID NO: 44397 - RNA, 21 nt, RNAi
gacuguugaagcauaauccuu

SEQ ID NO: 44398 - RNA, 21 nt, RNAi
uucugacaacuucguauuagg

SEQ ID NO: 44399 - DNA, 21 bp, Homo sapiens
cacataccaagagacctacaa

SEQ ID NO: 44400 - RNA, 21 nt, RNAi
cauaccaagagaccuacaauu

SEQ ID NO: 44401 - RNA, 21 nt, RNAi
uuguaugguucucuggauguu

SEQ ID NO: 44402 - DNA, 21 bp, Homo sapiens
gaggcaaacacataccaagag

SEQ ID NO: 44403 - RNA, 21 nt, RNAi
ggcaaacacauaccaagaguu

SEQ ID NO: 44404 - RNA, 21 nt, RNAi
uuccguuuguguaugguucuc

SEQ ID NO: 44405 - DNA, 21 bp, Homo sapiens
aactttccgtggtttcagcgt

SEQ ID NO: 44406 - RNA, 21 nt, RNAi
cuuuccgugguuucagcguuu

SEQ ID NO: 44407 - RNA, 21 nt, RNAi
uugaaaggcaccaaagucgca

SEQ ID NO: 44408 - DNA, 21 bp, Homo sapiens
aaggaagctaatccggagaac

SEQ ID NO: 44409 - RNA, 21 nt, RNAi
ggaagcuaauccggagaacuu

SEQ ID NO: 44410 - RNA, 21 nt, RNAi
uuccuucgauuaggccucuug

SEQ ID NO: 44411 - DNA, 21 bp, Homo sapiens
aaatatggcgacctgcatcgg

SEQ ID NO: 44412 - RNA, 21 nt, RNAi
auauggcgaccugcaucgguu

SEQ ID NO: 44413 - RNA, 21 nt, RNAi
uuuauaccgcuggacguagcc

SEQ ID NO: 44414 - DNA, 21 bp, Homo sapiens
aaagttggaaatctgcttggt

SEQ ID NO: 44415 - RNA, 21 nt, RNAi
aguuggaaaucugcuugguuu

SEQ ID NO: 44416 - RNA, 21 nt, RNAi
uuucaaccuuuagacgaacca

SEQ ID NO: 44417 - DNA, 21 bp, Homo sapiens
aagttggaaatctgcttggta

SEQ ID NO: 44418 - RNA, 21 nt, RNAi
guuggaaaucugcuugguauu

SEQ ID NO: 44419 - RNA, 21 nt, RNAi
uucaaccuuuagacgaaccau

SEQ ID NO: 44420 - DNA, 21 bp, Homo sapiens
aaatctgcttggtaaaggatc

SEQ ID NO: 44421 - RNA, 21 nt, RNAi
aucugcuugguaaaggaucuu

SEQ ID NO: 44422 - RNA, 21 nt, RNAi
uuuagacgaaccauuuccuag

SEQ ID NO: 44423 - DNA, 21 bp, Homo sapiens
aatctgcttggtaaaggatca

SEQ ID NO: 44424 - RNA, 21 nt, RNAi
ucugcuugguaaaggaucauu

SEQ ID NO: 44425 - RNA, 21 nt, RNAi
uuagacgaaccauuuccuagu

SEQ ID NO: 44426 - DNA, 21 bp, Homo sapiens
aaaggatcatttgctggtgtc

SEQ ID NO: 44427 - RNA, 21 nt, RNAi
aggaucauuugcuggugucuu

SEQ ID NO: 44428 - RNA, 21 nt, RNAi
uuuccuaguaaacgaccacag

SEQ ID NO: 44429 - DNA, 21 bp, Homo sapiens
aaggatcatttgctggtgtct

SEQ ID NO: 44430 - RNA, 21 nt, RNAi
ggaucauuugcuggugucuuu

SEQ ID NO: 44431 - RNA, 21 nt, RNAi
uuccuaguaaacgaccacaga

SEQ ID NO: 44432 - DNA, 21 bp, Homo sapiens
aagaaagccatgtacaaagca

SEQ ID NO: 44433 - RNA, 21 nt, RNAi
gaaagccauguacaaagcauu

SEQ ID NO: 44434 - RNA, 21 nt, RNAi
uucuuucgguacauguuucgu

SEQ ID NO: 44435 - DNA, 21 bp, Homo sapiens
aaagccatgtacaaagcagga

SEQ ID NO: 44436 - RNA, 21 nt, RNAi
agccauguacaaagcaggauu

SEQ ID NO: 44437 - RNA, 21 nt, RNAi
uuucgguacauguuucguccu

SEQ ID NO: 44438 - DNA, 21 bp, Homo sapiens
aagccatgtacaaagcaggaa

SEQ ID NO: 44439 - RNA, 21 nt, RNAi
gccauguacaaagcaggaauu

SEQ ID NO: 44440 - RNA, 21 nt, RNAi
uucgguacauguuucguccuu

SEQ ID NO: 44441 - DNA, 21 bp, Homo sapiens
aaagcaggaatggtacagaga

SEQ ID NO: 44442 - RNA, 21 nt, RNAi
agcaggaaugguacagagauu

SEQ ID NO: 44443 - RNA, 21 nt, RNAi
uuucguccuuaccaugucucu

SEQ ID NO: 44444 - DNA, 21 bp, Homo sapiens
aagcaggaatggtacagagag

SEQ ID NO: 44445 - RNA, 21 nt, RNAi
gcaggaaugguacagagaguu

SEQ ID NO: 44446 - RNA, 21 nt, RNAi
uucguccuuaccaugucucuc

SEQ ID NO: 44447 - DNA, 21 bp, Homo sapiens
aaacatccttctatcttggag

SEQ ID NO: 44448 - RNA, 21 nt, RNAi
acauccuucuaucuuggaguu

SEQ ID NO: 44449 - RNA, 21 nt, RNAi
uuuguaggaagauagaaccuc

SEQ ID NO: 44450 - DNA, 21 bp, Homo sapiens
aacatccttctatcttggagc

SEQ ID NO: 44451 - RNA, 21 nt, RNAi
cauccuucuaucuuggagcuu

SEQ ID NO: 44452 - RNA, 21 nt, RNAi
uuguaggaagauagaaccucg

SEQ ID NO: 44453 - DNA, 21 bp, Homo sapiens
aaatgtgccataatggagaaa

SEQ ID NO: 44454 - RNA, 21 nt, RNAi
augugccauaauggagaaauu

SEQ ID NO: 44455 - RNA, 21 nt, RNAi
uuuacacgguauuaccucuuu

SEQ ID NO: 44456 - DNA, 21 bp, Homo sapiens
aatgtgccataatggagaaat

SEQ ID NO: 44457 - RNA, 21 nt, RNAi
ugugccauaauggagaaauuu

SEQ ID NO: 44458 - RNA, 21 nt, RNAi
uuacacgguauuaccucuuua

SEQ ID NO: 44459 - DNA, 21 bp, Homo sapiens
aatggagaaatgaacaggtat

SEQ ID NO: 44460 - RNA, 21 nt, RNAi
uggagaaaugaacagguauuu

SEQ ID NO: 44461 - RNA, 21 nt, RNAi
uuaccucuuuacuuguccaua

SEQ ID NO: 44462 - DNA, 21 bp, Homo sapiens
aaatgaagctcgacacttcat

SEQ ID NO: 44463 - RNA, 21 nt, RNAi
augaagcucgacacuucauuu

SEQ ID NO: 44464 - RNA, 21 nt, RNAi
uuuacuucgagcugugaagua

SEQ ID NO: 44465 - DNA, 21 bp, Homo sapiens
aatgaagctcgacacttcatg

SEQ ID NO: 44466 - RNA, 21 nt, RNAi
ugaagcucgacacuucauguu

SEQ ID NO: 44467 - RNA, 21 nt, RNAi
uuacuucgagcugugaaguac

SEQ ID NO: 44468 - DNA, 21 bp, Homo sapiens
aagctcgacacttcatgcacc

SEQ ID NO: 44469 - RNA, 21 nt, RNAi
gcucgacacuucaugcaccuu

SEQ ID NO: 44470 - RNA, 21 nt, RNAi
uucgagcugugaaguacgugg

SEQ ID NO: 44471 - DNA, 21 bp, Homo sapiens
aacctcctactgactcgtaat

SEQ ID NO: 44472 - RNA, 21 nt, RNAi
ccuccuacugacucguaauuu

SEQ ID NO: 44473 - RNA, 21 nt, RNAi
uuggaggaugacugagcauua

SEQ ID NO: 44474 - DNA, 21 bp, Homo sapiens
aaagcactatacattatgtgg

SEQ ID NO: 44475 - RNA, 21 nt, RNAi
agcacuauacauuaugugguu

SEQ ID NO: 44476 - RNA, 21 nt, RNAi
uuucgugauauguaauacacc

SEQ ID NO: 44477 - DNA, 21 bp, Homo sapiens
aagcactatacattatgtgga

SEQ ID NO: 44478 - RNA, 21 nt, RNAi
gcacuauacauuauguggauu

SEQ ID NO: 44479 - RNA, 21 nt, RNAi
uucgugauauguaauacaccu

SEQ ID NO: 44480 - DNA, 21 bp, Homo sapiens
aactcctaactacatttcacc

SEQ ID NO: 44481 - RNA, 21 nt, RNAi
cuccuaacuacauuucaccuu

SEQ ID NO: 44482 - RNA, 21 nt, RNAi
uugaggauugauguaaagugg

SEQ ID NO: 44483 - DNA, 21 bp, Homo sapiens
aaattgccactcgaagtgcac

SEQ ID NO: 44484 - RNA, 21 nt, RNAi
auugccacucgaagugcacuu

SEQ ID NO: 44485 - RNA, 21 nt, RNAi
uuuaacggugagcuucacgug

SEQ ID NO: 44486 - DNA, 21 bp, Homo sapiens
aattgccactcgaagtgcaca

SEQ ID NO: 44487 - RNA, 21 nt, RNAi
uugccacucgaagugcacauu

SEQ ID NO: 44488 - RNA, 21 nt, RNAi
uuaacggugagcuucacgugu

SEQ ID NO: 44489 - DNA, 21 bp, Homo sapiens
aagtgcacatggccttgaatc

SEQ ID NO: 44490 - RNA, 21 nt, RNAi
gugcacauggccuugaaucuu

SEQ ID NO: 44491 - RNA, 21 nt, RNAi
uucacguguaccggaacuuag

SEQ ID NO: 44492 - DNA, 21 bp, Homo sapiens
aagtagtattggcagattatg

SEQ ID NO: 44493 - RNA, 21 nt, RNAi
guaguauuggcagauuauguu

SEQ ID NO: 44494 - RNA, 21 nt, RNAi
uucaucauaaccgucuaauac

SEQ ID NO: 44495 - DNA, 21 bp, Homo sapiens
aatagaggccaaggaccttat

SEQ ID NO: 44496 - RNA, 21 nt, RNAi
uagaggccaaggaccuuauuu

SEQ ID NO: 44497 - RNA, 21 nt, RNAi
uuaucuccgguuccuggaaua

SEQ ID NO: 44498 - DNA, 21 bp, Homo sapiens
aaggaccttattcaccagtta

SEQ ID NO: 44499 - RNA, 21 nt, RNAi
ggaccuuauucaccaguuauu

SEQ ID NO: 44500 - RNA, 21 nt, RNAi
uuccuggaauaaguggucaau

SEQ ID NO: 44501 - DNA, 21 bp, Homo sapiens
aaatccagcagatcgtttaag

SEQ ID NO: 44502 - RNA, 21 nt, RNAi
auccagcagaucguuuaaguu

SEQ ID NO: 44503 - RNA, 21 nt, RNAi
uuuaggucgucuagcaaauuc

SEQ ID NO: 44504 - DNA, 21 bp, Homo sapiens
aatccagcagatcgtttaagt

SEQ ID NO: 44505 - RNA, 21 nt, RNAi
uccagcagaucguuuaaguuu

SEQ ID NO: 44506 - RNA, 21 nt, RNAi
uuaggucgucuagcaaauuca

SEQ ID NO: 44507 - DNA, 21 bp, Homo sapiens
aagtctgtcttcagtattgga

SEQ ID NO: 44508 - RNA, 21 nt, RNAi
gucugucuucaguauuggauu

SEQ ID NO: 44509 - RNA, 21 nt, RNAi
uucagacagaagucauaaccu

SEQ ID NO: 44510 - DNA, 21 bp, Homo sapiens
aaagatttaggaactgtggaa

SEQ ID NO: 44511 - RNA, 21 nt, RNAi
agauuuaggaacuguggaauu

SEQ ID NO: 44512 - RNA, 21 nt, RNAi
uuucuaaauccuugacaccuu

SEQ ID NO: 44513 - DNA, 21 bp, Homo sapiens
aagatttaggaactgtggaag

SEQ ID NO: 44514 - RNA, 21 nt, RNAi
gauuuaggaacuguggaaguu

SEQ ID NO: 44515 - RNA, 21 nt, RNAi
uucuaaauccuugacaccuuc

SEQ ID NO: 44516 - DNA, 21 bp, Homo sapiens
aactgtggaagactcaattga

SEQ ID NO: 44517 - RNA, 21 nt, RNAi
cuguggaagacucaauugauu

SEQ ID NO: 44518 - RNA, 21 nt, RNAi
uugacaccuucugaguuaacu

SEQ ID NO: 44519 - DNA, 21 bp, Homo sapiens
aatttctactgcaattacagc

SEQ ID NO: 44520 - RNA, 21 nt, RNAi
uuucuacugcaauuacagcuu

SEQ ID NO: 44521 - RNA, 21 nt, RNAi
uuaaagaugacguuaaugucg

SEQ ID NO: 44522 - DNA, 21 bp, Homo sapiens
aattacagcttcttccagtac

SEQ ID NO: 44523 - RNA, 21 nt, RNAi
uuacagcuucuuccaguacuu

SEQ ID NO: 44524 - RNA, 21 nt, RNAi
uuaaugucgaagaaggucaug

SEQ ID NO: 44525 - DNA, 21 bp, Homo sapiens
aagaaaccagtaatagtggaa

SEQ ID NO: 44526 - RNA, 21 nt, RNAi
gaaaccaguaauaguggaauu

SEQ ID NO: 44527 - RNA, 21 nt, RNAi
uucuuuggucauuaucaccuu

SEQ ID NO: 44528 - DNA, 21 bp, Homo sapiens
aagagtaattcaagatgcaga

SEQ ID NO: 44529 - RNA, 21 nt, RNAi
gaguaauucaagaugcagauu

SEQ ID NO: 44530 - RNA, 21 nt, RNAi
uucucauuaaguucuacgucu

SEQ ID NO: 44531 - DNA, 21 bp, Homo sapiens
aattcaagatgcagaagaaag

SEQ ID NO: 44532 - RNA, 21 nt, RNAi
uucaagaugcagaagaaaguu

SEQ ID NO: 44533 - RNA, 21 nt, RNAi
uuaaguucuacgucuucuuuc

SEQ ID NO: 44534 - DNA, 21 bp, Homo sapiens
aagatgcagaagaaaggccac

SEQ ID NO: 44535 - RNA, 21 nt, RNAi
gaugcagaagaaaggccacuu

SEQ ID NO: 44536 - RNA, 21 nt, RNAi
uucuacgucuucuuuccggug

SEQ ID NO: 44537 - DNA, 21 bp, Homo sapiens
aagaaaggccacattctcgat

SEQ ID NO: 44538 - RNA, 21 nt, RNAi
gaaaggccacauucucgauuu

SEQ ID NO: 44539 - RNA, 21 nt, RNAi
uucuuuccgguguaagagcua

SEQ ID NO: 44540 - DNA, 21 bp, Homo sapiens
aaaggccacattctcgatacc

SEQ ID NO: 44541 - RNA, 21 nt, RNAi
aggccacauucucgauaccuu

SEQ ID NO: 44542 - RNA, 21 nt, RNAi
uuuccgguguaagagcuaugg

SEQ ID NO: 44543 - DNA, 21 bp, Homo sapiens
aaggccacattctcgatacct

SEQ ID NO: 44544 - RNA, 21 nt, RNAi
ggccacauucucgauaccuuu

SEQ ID NO: 44545 - RNA, 21 nt, RNAi
uuccgguguaagagcuaugga

SEQ ID NO: 44546 - DNA, 21 bp, Homo sapiens
aacatatacaatggaacgatg

SEQ ID NO: 44547 - RNA, 21 nt, RNAi
cauauacaauggaacgauguu

SEQ ID NO: 44548 - RNA, 21 nt, RNAi
uuguauauguuaccuugcuac

SEQ ID NO: 44549 - DNA, 21 bp, Homo sapiens
aatggaacgatgtcactcagc

SEQ ID NO: 44550 - RNA, 21 nt, RNAi
uggaacgaugucacucagcuu

SEQ ID NO: 44551 - RNA, 21 nt, RNAi
uuaccuugcuacagugagucg

SEQ ID NO: 44552 - DNA, 21 bp, Homo sapiens
aacgatgtcactcagcagaaa

SEQ ID NO: 44553 - RNA, 21 nt, RNAi
cgaugucacucagcagaaauu

SEQ ID NO: 44554 - RNA, 21 nt, RNAi
uugcuacagugagucgucuuu

SEQ ID NO: 44555 - DNA, 21 bp, Homo sapiens
aaagatcaggaggaggtgaaa

SEQ ID NO: 44556 - RNA, 21 nt, RNAi
agaucaggaggaggugaaauu

SEQ ID NO: 44557 - RNA, 21 nt, RNAi
uuucuaguccuccuccacuuu

SEQ ID NO: 44558 - DNA, 21 bp, Homo sapiens
aaatgaagagaggtactcacc

SEQ ID NO: 44559 - RNA, 21 nt, RNAi
augaagagagguacucaccuu

SEQ ID NO: 44560 - RNA, 21 nt, RNAi
uuuacuucucuccaugagugg

SEQ ID NO: 44561 - DNA, 21 bp, Homo sapiens
aaagacatccagtagttctgg

SEQ ID NO: 44562 - RNA, 21 nt, RNAi
agacauccaguaguucugguu

SEQ ID NO: 44563 - RNA, 21 nt, RNAi
uuucuguaggucaucaagacc

SEQ ID NO: 44564 - DNA, 21 bp, Homo sapiens
aagacatccagtagttctgga

SEQ ID NO: 44565 - RNA, 21 nt, RNAi
gacauccaguaguucuggauu

SEQ ID NO: 44566 - RNA, 21 nt, RNAi
uucuguaggucaucaagaccu

SEQ ID NO: 44567 - DNA, 21 bp, Homo sapiens
aaagacctgataacaatcaag

SEQ ID NO: 44568 - RNA, 21 nt, RNAi
agaccugauaacaaucaaguu

SEQ ID NO: 44569 - RNA, 21 nt, RNAi
uuucuggacuauuguuaguuc

SEQ ID NO: 44570 - DNA, 21 bp, Homo sapiens
aagacctgataacaatcaagc

SEQ ID NO: 44571 - RNA, 21 nt, RNAi
gaccugauaacaaucaagcuu

SEQ ID NO: 44572 - RNA, 21 nt, RNAi
uucuggacuauuguuaguucg

SEQ ID NO: 44573 - DNA, 21 bp, Homo sapiens
aacaatcaagcactctccaat

SEQ ID NO: 44574 - RNA, 21 nt, RNAi
caaucaagcacucuccaauuu

SEQ ID NO: 44575 - RNA, 21 nt, RNAi
uuguuaguucgugagagguua

SEQ ID NO: 44576 - DNA, 21 bp, Homo sapiens
aatcaagcactctccaatcat

SEQ ID NO: 44577 - RNA, 21 nt, RNAi
ucaagcacucuccaaucauuu

SEQ ID NO: 44578 - RNA, 21 nt, RNAi
uuaguucgugagagguuagua

SEQ ID NO: 44579 - DNA, 21 bp, Homo sapiens
aagcactctccaatcatcttt

SEQ ID NO: 44580 - RNA, 21 nt, RNAi
gcacucuccaaucaucuuuuu

SEQ ID NO: 44581 - RNA, 21 nt, RNAi
uucgugagagguuaguagaaa

SEQ ID NO: 44582 - DNA, 21 bp, Homo sapiens
aaaccgtacaacagtggtttg

SEQ ID NO: 44583 - RNA, 21 nt, RNAi
accguacaacagugguuuguu

SEQ ID NO: 44584 - RNA, 21 nt, RNAi
uuuggcauguugucaccaaac

SEQ ID NO: 44585 - DNA, 21 bp, Homo sapiens
aaccgtacaacagtggtttgg

SEQ ID NO: 44586 - RNA, 21 nt, RNAi
ccguacaacagugguuugguu

SEQ ID NO: 44587 - RNA, 21 nt, RNAi
uuggcauguugucaccaaacc

SEQ ID NO: 44588 - DNA, 21 bp, Homo sapiens
aaactactgaatatgacagca

SEQ ID NO: 44589 - RNA, 21 nt, RNAi
acuacugaauaugacagcauu

SEQ ID NO: 44590 - RNA, 21 nt, RNAi
uuugaugacuuauacugucgu

SEQ ID NO: 44591 - DNA, 21 bp, Homo sapiens
aactactgaatatgacagcat

SEQ ID NO: 44592 - RNA, 21 nt, RNAi
cuacugaauaugacagcauuu

SEQ ID NO: 44593 - RNA, 21 nt, RNAi
uugaugacuuauacugucgua

SEQ ID NO: 44594 - DNA, 21 bp, Homo sapiens
aaatgcctggactgatacaaa

SEQ ID NO: 44595 - RNA, 21 nt, RNAi
augccuggacugauacaaauu

SEQ ID NO: 44596 - RNA, 21 nt, RNAi
uuuacggaccugacuauguuu

SEQ ID NO: 44597 - DNA, 21 bp, Homo sapiens
aaagaactctgatgcttctga

SEQ ID NO: 44598 - RNA, 21 nt, RNAi
agaacucugaugcuucugauu

SEQ ID NO: 44599 - RNA, 21 nt, RNAi
uuucuugagacuacgaagacu

SEQ ID NO: 44600 - DNA, 21 bp, Homo sapiens
aagaactctgatgcttctgat

SEQ ID NO: 44601 - RNA, 21 nt, RNAi
gaacucugaugcuucugauuu

SEQ ID NO: 44602 - RNA, 21 nt, RNAi
uucuugagacuacgaagacua

SEQ ID NO: 44603 - DNA, 21 bp, Homo sapiens
aactctgatgcttctgataat

SEQ ID NO: 44604 - RNA, 21 nt, RNAi
cucugaugcuucugauaauuu

SEQ ID NO: 44605 - RNA, 21 nt, RNAi
uugagacuacgaagacuauua

SEQ ID NO: 44606 - DNA, 21 bp, Homo sapiens
aaatatatgactgcacttcac

SEQ ID NO: 44607 - RNA, 21 nt, RNAi
auauaugacugcacuucacuu

SEQ ID NO: 44608 - RNA, 21 nt, RNAi
uuuauauacugacgugaagug

SEQ ID NO: 44609 - DNA, 21 bp, Homo sapiens
aatatatgactgcacttcaca

SEQ ID NO: 44610 - RNA, 21 nt, RNAi
uauaugacugcacuucacauu

SEQ ID NO: 44611 - RNA, 21 nt, RNAi
uuauauacugacgugaagugu

SEQ ID NO: 44612 - DNA, 21 bp, Homo sapiens
aaacctgagataatccaacaa

SEQ ID NO: 44613 - RNA, 21 nt, RNAi
accugagauaauccaacaauu

SEQ ID NO: 44614 - RNA, 21 nt, RNAi
uuuggacucuauuagguuguu

SEQ ID NO: 44615 - DNA, 21 bp, Homo sapiens
aacctgagataatccaacaag

SEQ ID NO: 44616 - RNA, 21 nt, RNAi
ccugagauaauccaacaaguu

SEQ ID NO: 44617 - RNA, 21 nt, RNAi
uuggacucuauuagguuguuc

SEQ ID NO: 44618 - DNA, 21 bp, Homo sapiens
aagaagcattacatctccgtt

SEQ ID NO: 44619 - RNA, 21 nt, RNAi
gaagcauuacaucuccguuuu

SEQ ID NO: 44620 - RNA, 21 nt, RNAi
uucuucguaauguagaggcaa

SEQ ID NO: 44621 - DNA, 21 bp, Homo sapiens
aagcattacatctccgttggt

SEQ ID NO: 44622 - RNA, 21 nt, RNAi
gcauuacaucuccguugguuu

SEQ ID NO: 44623 - RNA, 21 nt, RNAi
uucguaauguagaggcaacca

SEQ ID NO: 44624 - DNA, 21 bp, Homo sapiens
aaaggctgtggtgagcatact

SEQ ID NO: 44625 - RNA, 21 nt, RNAi
aggcuguggugagcauacuuu

SEQ ID NO: 44626 - RNA, 21 nt, RNAi
uuuccgacaccacucguauga

SEQ ID NO: 44627 - DNA, 21 bp, Homo sapiens
aaggctgtggtgagcatactt

SEQ ID NO: 44628 - RNA, 21 nt, RNAi
ggcuguggugagcauacuuuu

SEQ ID NO: 44629 - RNA, 21 nt, RNAi
uuccgacaccacucguaugaa

SEQ ID NO: 44630 - DNA, 21 bp, Homo sapiens
aaaggagtatgcatctcaaga

SEQ ID NO: 44631 - RNA, 21 nt, RNAi
aggaguaugcaucucaagauu

SEQ ID NO: 44632 - RNA, 21 nt, RNAi
uuuccucauacguagaguucu

SEQ ID NO: 44633 - DNA, 21 bp, Homo sapiens
aaggagtatgcatctcaagaa

SEQ ID NO: 44634 - RNA, 21 nt, RNAi
ggaguaugcaucucaagaauu

SEQ ID NO: 44635 - RNA, 21 nt, RNAi
uuccucauacguagaguucuu

SEQ ID NO: 44636 - DNA, 21 bp, Homo sapiens
aagttcttcagatatctagtg

SEQ ID NO: 44637 - RNA, 21 nt, RNAi
guucuucagauaucuaguguu

SEQ ID NO: 44638 - RNA, 21 nt, RNAi
uucaagaagucuauagaucac

SEQ ID NO: 44639 - DNA, 21 bp, Homo sapiens
aacatcagtaggtacagcttt

SEQ ID NO: 44640 - RNA, 21 nt, RNAi
caucaguagguacagcuuuuu

SEQ ID NO: 44641 - RNA, 21 nt, RNAi
uuguagucauccaugucgaaa

SEQ ID NO: 44642 - DNA, 21 bp, Homo sapiens
aaatatcaatatgcttccagg

SEQ ID NO: 44643 - RNA, 21 nt, RNAi
auaucaauaugcuuccagguu

SEQ ID NO: 44644 - RNA, 21 nt, RNAi
uuuauaguuauacgaaggucc

SEQ ID NO: 44645 - DNA, 21 bp, Homo sapiens
aatatcaatatgcttccaggt

SEQ ID NO: 44646 - RNA, 21 nt, RNAi
uaucaauaugcuuccagguuu

SEQ ID NO: 44647 - RNA, 21 nt, RNAi
uuauaguuauacgaaggucca

SEQ ID NO: 44648 - DNA, 21 bp, Homo sapiens
aatatgcttccaggtttgtac

SEQ ID NO: 44649 - RNA, 21 nt, RNAi
uaugcuuccagguuuguacuu

SEQ ID NO: 44650 - RNA, 21 nt, RNAi
uuauacgaagguccaaacaug

SEQ ID NO: 44651 - DNA, 21 bp, Homo sapiens
aaacagaagatttcattcagg

SEQ ID NO: 44652 - RNA, 21 nt, RNAi
acagaagauuucauucagguu

SEQ ID NO: 44653 - RNA, 21 nt, RNAi
uuugucuucuaaaguaagucc

SEQ ID NO: 44654 - DNA, 21 bp, Homo sapiens
aacagaagatttcattcaggt

SEQ ID NO: 44655 - RNA, 21 nt, RNAi
cagaagauuucauucagguuu

SEQ ID NO: 44656 - RNA, 21 nt, RNAi
uugucuucuaaaguaagucca

SEQ ID NO: 44657 - DNA, 21 bp, Homo sapiens
aagatttcattcaggtgattg

SEQ ID NO: 44658 - RNA, 21 nt, RNAi
gauuucauucaggugauuguu

SEQ ID NO: 44659 - RNA, 21 nt, RNAi
uucuaaaguaaguccacuaac

SEQ ID NO: 44660 - DNA, 21 bp, Homo sapiens
aagttaatagcttgaaagagg

SEQ ID NO: 44661 - RNA, 21 nt, RNAi
guuaauagcuugaaagagguu

SEQ ID NO: 44662 - RNA, 21 nt, RNAi
uucaauuaucgaacuuucucc

SEQ ID NO: 44663 - DNA, 21 bp, Homo sapiens
aatagcttgaaagaggagata

SEQ ID NO: 44664 - RNA, 21 nt, RNAi
uagcuugaaagaggagauauu

SEQ ID NO: 44665 - RNA, 21 nt, RNAi
uuaucgaacuuucuccucuau

SEQ ID NO: 44666 - DNA, 21 bp, Homo sapiens
aaatgtatatggaccatgcta

SEQ ID NO: 44667 - RNA, 21 nt, RNAi
auguauauggaccaugcuauu

SEQ ID NO: 44668 - RNA, 21 nt, RNAi
uuuacauauaccugguacgau

SEQ ID NO: 44669 - DNA, 21 bp, Homo sapiens
aatgtatatggaccatgctaa

SEQ ID NO: 44670 - RNA, 21 nt, RNAi
uguauauggaccaugcuaauu

SEQ ID NO: 44671 - RNA, 21 nt, RNAi
uuacauauaccugguacgauu

SEQ ID NO: 44672 - DNA, 21 bp, Homo sapiens
aatccataatttcagaagagg

SEQ ID NO: 44673 - RNA, 21 nt, RNAi
uccauaauuucagaagagguu

SEQ ID NO: 44674 - RNA, 21 nt, RNAi
uuagguauuaaagucuucucc

SEQ ID NO: 44675 - DNA, 21 bp, Homo sapiens
aatttcagaagaggaaaggaa

SEQ ID NO: 44676 - RNA, 21 nt, RNAi
uuucagaagaggaaaggaauu

SEQ ID NO: 44677 - RNA, 21 nt, RNAi
uuaaagucuucuccuuuccuu

SEQ ID NO: 44678 - DNA, 21 bp, Homo sapiens
aaacctggtagtactagttca

SEQ ID NO: 44679 - RNA, 21 nt, RNAi
accugguaguacuaguucauu

SEQ ID NO: 44680 - RNA, 21 nt, RNAi
uuuggaccaucaugaucaagu

SEQ ID NO: 44681 - DNA, 21 bp, Homo sapiens
aacctggtagtactagttcac

SEQ ID NO: 44682 - RNA, 21 nt, RNAi
ccugguaguacuaguucacuu

SEQ ID NO: 44683 - RNA, 21 nt, RNAi
uuggaccaucaugaucaagug

SEQ ID NO: 44684 - DNA, 21 bp, Homo sapiens
aaggccttatcacctcctcct

SEQ ID NO: 44685 - RNA, 21 nt, RNAi
ggccuuaucaccuccuccuuu

SEQ ID NO: 44686 - RNA, 21 nt, RNAi
uuccggaauaguggaggagga

SEQ ID NO: 44687 - DNA, 21 bp, Homo sapiens
aacgagagatagagcatcttt

SEQ ID NO: 44688 - RNA, 21 nt, RNAi
cgagagauagagcaucuuuuu

SEQ ID NO: 44689 - RNA, 21 nt, RNAi
uugcucucuaucucguagaaa

SEQ ID NO: 44690 - DNA, 21 bp, Homo sapiens
aacagaatggtcatgcatagt

SEQ ID NO: 44691 - RNA, 21 nt, RNAi
cagaauggucaugcauaguuu

SEQ ID NO: 44692 - RNA, 21 nt, RNAi
uugucuuaccaguacguauca

SEQ ID NO: 44693 - DNA, 21 bp, Homo sapiens
aatggtcatgcatagtgatgc

SEQ ID NO: 44694 - RNA, 21 nt, RNAi
uggucaugcauagugaugcuu

SEQ ID NO: 44695 - RNA, 21 nt, RNAi
uuaccaguacguaucacuacg

SEQ ID NO: 44696 - DNA, 21 bp, Homo sapiens
aacacaggcaccaatccttaa

SEQ ID NO: 44697 - RNA, 21 nt, RNAi
cacaggcaccaauccuuaauu

SEQ ID NO: 44698 - RNA, 21 nt, RNAi
uuguguccgugguuaggaauu

SEQ ID NO: 44699 - DNA, 21 bp, Homo sapiens
aaatgaaggacttggtcttac

SEQ ID NO: 44700 - RNA, 21 nt, RNAi
augaaggacuuggucuuacuu

SEQ ID NO: 44701 - RNA, 21 nt, RNAi
uuuacuuccugaaccagaaug

SEQ ID NO: 44702 - DNA, 21 bp, Homo sapiens
aatgaaggacttggtcttaca

SEQ ID NO: 44703 - RNA, 21 nt, RNAi
ugaaggacuuggucuuacauu

SEQ ID NO: 44704 - RNA, 21 nt, RNAi
uuacuuccugaaccagaaugu

SEQ ID NO: 44705 - DNA, 21 bp, Homo sapiens
aaggacttggtcttacaacta

SEQ ID NO: 44706 - RNA, 21 nt, RNAi
ggacuuggucuuacaacuauu

SEQ ID NO: 44707 - RNA, 21 nt, RNAi
uuccugaaccagaauguugau

SEQ ID NO: 44708 - DNA, 21 bp, Homo sapiens
aactacagcttctggaacaga

SEQ ID NO: 44709 - RNA, 21 nt, RNAi
cuacagcuucuggaacagauu

SEQ ID NO: 44710 - RNA, 21 nt, RNAi
uugaugucgaagaccuugucu

SEQ ID NO: 44711 - DNA, 21 bp, Homo sapiens
aacagacatctcttctaatag

SEQ ID NO: 44712 - RNA, 21 nt, RNAi
cagacaucucuucuaauaguu

SEQ ID NO: 44713 - RNA, 21 nt, RNAi
uugucuguagagaagauuauc

SEQ ID NO: 44714 - DNA, 21 bp, Homo sapiens
aagattgtcttcctaaatcag

SEQ ID NO: 44715 - RNA, 21 nt, RNAi
gauugucuuccuaaaucaguu

SEQ ID NO: 44716 - RNA, 21 nt, RNAi
uucuaacagaaggauuuaguc

SEQ ID NO: 44717 - DNA, 21 bp, Homo sapiens
aaatggtcaaacaactaggta

SEQ ID NO: 44718 - RNA, 21 nt, RNAi
auggucaaacaacuagguauu

SEQ ID NO: 44719 - RNA, 21 nt, RNAi
uuuaccaguuuguugauccau

SEQ ID NO: 44720 - DNA, 21 bp, Homo sapiens
aatggtcaaacaactaggtat

SEQ ID NO: 44721 - RNA, 21 nt, RNAi
uggucaaacaacuagguauuu

SEQ ID NO: 44722 - RNA, 21 nt, RNAi
uuaccaguuuguugauccaua

SEQ ID NO: 44723 - DNA, 21 bp, Homo sapiens
aaacaactaggtatggagaaa

SEQ ID NO: 44724 - RNA, 21 nt, RNAi
acaacuagguauggagaaauu

SEQ ID NO: 44725 - RNA, 21 nt, RNAi
uuuguugauccauaccucuuu

SEQ ID NO: 44726 - DNA, 21 bp, Homo sapiens
aattaccagactacatcaaac

SEQ ID NO: 44727 - RNA, 21 nt, RNAi
uuaccagacuacaucaaacuu

SEQ ID NO: 44728 - RNA, 21 nt, RNAi
uuaauggucugauguaguuug

SEQ ID NO: 44729 - DNA, 21 bp, Homo sapiens
aaacagaaattacagtgtctg

SEQ ID NO: 44730 - RNA, 21 nt, RNAi
acagaaauuacagugucuguu

SEQ ID NO: 44731 - RNA, 21 nt, RNAi
uuugucuuuaaugucacagac

SEQ ID NO: 44732 - DNA, 21 bp, Homo sapiens
aacagaaattacagtgtctgt

SEQ ID NO: 44733 - RNA, 21 nt, RNAi
cagaaauuacagugucuguuu

SEQ ID NO: 44734 - RNA, 21 nt, RNAi
uugucuuuaaugucacagaca

SEQ ID NO: 44735 - DNA, 21 bp, Homo sapiens
aaattacagtgtctgtcttcc

SEQ ID NO: 44736 - RNA, 21 nt, RNAi
auuacagugucugucuuccuu

SEQ ID NO: 44737 - RNA, 21 nt, RNAi
uuuaaugucacagacagaagg

SEQ ID NO: 44738 - DNA, 21 bp, Homo sapiens
aattacagtgtctgtcttcca

SEQ ID NO: 44739 - RNA, 21 nt, RNAi
uuacagugucugucuuccauu

SEQ ID NO: 44740 - RNA, 21 nt, RNAi
uuaaugucacagacagaaggu

SEQ ID NO: 44741 - DNA, 21 bp, Homo sapiens
aactcctttcagacatataag

SEQ ID NO: 44742 - RNA, 21 nt, RNAi
cuccuuucagacauauaaguu

SEQ ID NO: 44743 - RNA, 21 nt, RNAi
uugaggaaagucuguauauuc

SEQ ID NO: 44744 - DNA, 21 bp, Homo sapiens
aacataaagtcttcagaaagc

SEQ ID NO: 44745 - RNA, 21 nt, RNAi
cauaaagucuucagaaagcuu

SEQ ID NO: 44746 - RNA, 21 nt, RNAi
uuguauuucagaagucuuucg

SEQ ID NO: 44747 - DNA, 21 bp, Homo sapiens
aaagtcttcagaaagcctttc

SEQ ID NO: 44748 - RNA, 21 nt, RNAi
agucuucagaaagccuuucuu

SEQ ID NO: 44749 - RNA, 21 nt, RNAi
uuucagaagucuuucggaaag

SEQ ID NO: 44750 - DNA, 21 bp, Homo sapiens
aagtcttcagaaagcctttct

SEQ ID NO: 44751 - RNA, 21 nt, RNAi
gucuucagaaagccuuucuuu

SEQ ID NO: 44752 - RNA, 21 nt, RNAi
uucagaagucuuucggaaaga

SEQ ID NO: 44753 - DNA, 21 bp, Homo sapiens
aatgtaaaccatgtatctgag

SEQ ID NO: 44754 - RNA, 21 nt, RNAi
uguaaaccauguaucugaguu

SEQ ID NO: 44755 - RNA, 21 nt, RNAi
uuacauuugguacauagacuc

SEQ ID NO: 44756 - DNA, 21 bp, Homo sapiens
aaaccatgtatctgagataac

SEQ ID NO: 44757 - RNA, 21 nt, RNAi
accauguaucugagauaacuu

SEQ ID NO: 44758 - RNA, 21 nt, RNAi
uuugguacauagacucuauug

SEQ ID NO: 44759 - DNA, 21 bp, Homo sapiens
aaccatgtatctgagataaca

SEQ ID NO: 44760 - RNA, 21 nt, RNAi
ccauguaucugagauaacauu

SEQ ID NO: 44761 - RNA, 21 nt, RNAi
uugguacauagacucuauugu

SEQ ID NO: 44762 - DNA, 21 bp, Homo sapiens
aacaaagcagaatgaaacttg

SEQ ID NO: 44763 - RNA, 21 nt, RNAi
caaagcagaaugaaacuuguu

SEQ ID NO: 44764 - RNA, 21 nt, RNAi
uuguuucgucuuacuuugaac

SEQ ID NO: 44765 - DNA, 21 bp, Homo sapiens
aaagcagaatgaaacttgagt

SEQ ID NO: 44766 - RNA, 21 nt, RNAi
agcagaaugaaacuugaguuu

SEQ ID NO: 44767 - RNA, 21 nt, RNAi
uuucgucuuacuuugaacuca

SEQ ID NO: 44768 - DNA, 21 bp, Homo sapiens
aagcagaatgaaacttgagtc

SEQ ID NO: 44769 - RNA, 21 nt, RNAi
gcagaaugaaacuugagucuu

SEQ ID NO: 44770 - RNA, 21 nt, RNAi
uucgucuuacuuugaacucag

SEQ ID NO: 44771 - DNA, 21 bp, Homo sapiens
aatgaaacttgagtcacttac

SEQ ID NO: 44772 - RNA, 21 nt, RNAi
ugaaacuugagucacuuacuu

SEQ ID NO: 44773 - RNA, 21 nt, RNAi
uuacuuugaacucagugaaug

SEQ ID NO: 44774 - DNA, 21 bp, Homo sapiens
aaatagaacacctgactttgc

SEQ ID NO: 44775 - RNA, 21 nt, RNAi
auagaacaccugacuuugcuu

SEQ ID NO: 44776 - RNA, 21 nt, RNAi
uuuaucuuguggacugaaacg

SEQ ID NO: 44777 - DNA, 21 bp, Homo sapiens
aatagaacacctgactttgct

SEQ ID NO: 44778 - RNA, 21 nt, RNAi
uagaacaccugacuuugcuuu

SEQ ID NO: 44779 - RNA, 21 nt, RNAi
uuaucuuguggacugaaacga

SEQ ID NO: 44780 - DNA, 21 bp, Homo sapiens
aacacctgactttgctcttag

SEQ ID NO: 44781 - RNA, 21 nt, RNAi
caccugacuuugcucuuaguu

SEQ ID NO: 44782 - RNA, 21 nt, RNAi
uuguggacugaaacgagaauc

SEQ ID NO: 44783 - DNA, 21 bp, Homo sapiens
caggccagagcctgaaatatg

SEQ ID NO: 44784 - RNA, 21 nt, RNAi
ggccagagccugaaauauguu

SEQ ID NO: 44785 - RNA, 21 nt, RNAi
uuccggucucggacuuuauac

SEQ ID NO: 44786 - DNA, 21 bp, Homo sapiens
cagagcctgaaatatggcgac

SEQ ID NO: 44787 - RNA, 21 nt, RNAi
gagccugaaauauggcgacuu

SEQ ID NO: 44788 - RNA, 21 nt, RNAi
uucucggacuuuauaccgcug

SEQ ID NO: 44789 - DNA, 21 bp, Homo sapiens
catttgctggtgtctacagag

SEQ ID NO: 44790 - RNA, 21 nt, RNAi
uuugcuggugucuacagaguu

SEQ ID NO: 44791 - RNA, 21 nt, RNAi
uuaaacgaccacagaugucuc

SEQ ID NO: 44792 - DNA, 21 bp, Homo sapiens
cagagctgagtccattcacag

SEQ ID NO: 44793 - RNA, 21 nt, RNAi
gagcugaguccauucacaguu

SEQ ID NO: 44794 - RNA, 21 nt, RNAi
uucucgacucagguaaguguc

SEQ ID NO: 44795 - DNA, 21 bp, Homo sapiens
cattcacagtggtttggaagt

SEQ ID NO: 44796 - RNA, 21 nt, RNAi
uucacagugguuuggaaguuu

SEQ ID NO: 44797 - RNA, 21 nt, RNAi
uuaagugucaccaaaccuuca

SEQ ID NO: 44798 - DNA, 21 bp, Homo sapiens
cacagtggtttggaagttgca

SEQ ID NO: 44799 - RNA, 21 nt, RNAi
cagugguuuggaaguugcauu

SEQ ID NO: 44800 - RNA, 21 nt, RNAi
uugucaccaaaccuucaacgu

SEQ ID NO: 44801 - DNA, 21 bp, Homo sapiens
cagtggtttggaagttgcaat

SEQ ID NO: 44802 - RNA, 21 nt, RNAi
gugguuuggaaguugcaauuu

SEQ ID NO: 44803 - RNA, 21 nt, RNAi
uucaccaaaccuucaacguua

SEQ ID NO: 44804 - DNA, 21 bp, Homo sapiens
catgtacaaagcaggaatggt

SEQ ID NO: 44805 - RNA, 21 nt, RNAi
uguacaaagcaggaaugguuu

SEQ ID NO: 44806 - RNA, 21 nt, RNAi
uuacauguuucguccuuacca

SEQ ID NO: 44807 - DNA, 21 bp, Homo sapiens
caaagcaggaatggtacagag

SEQ ID NO: 44808 - RNA, 21 nt, RNAi
aagcaggaaugguacagaguu

SEQ ID NO: 44809 - RNA, 21 nt, RNAi
uuuucguccuuaccaugucuc

SEQ ID NO: 44810 - DNA, 21 bp, Homo sapiens
caggaatggtacagagagtcc

SEQ ID NO: 44811 - RNA, 21 nt, RNAi
ggaaugguacagagaguccuu

SEQ ID NO: 44812 - RNA, 21 nt, RNAi
uuccuuaccaugucucucagg

SEQ ID NO: 44813 - DNA, 21 bp, Homo sapiens
cattgccaattgaaacatcct

SEQ ID NO: 44814 - RNA, 21 nt, RNAi
uugccaauugaaacauccuuu

SEQ ID NO: 44815 - RNA, 21 nt, RNAi
uuaacgguuaacuuuguagga

SEQ ID NO: 44816 - DNA, 21 bp, Homo sapiens
caattgaaacatccttctatc

SEQ ID NO: 44817 - RNA, 21 nt, RNAi
auugaaacauccuucuaucuu

SEQ ID NO: 44818 - RNA, 21 nt, RNAi
uuuaacuuuguaggaagauag

SEQ ID NO: 44819 - DNA, 21 bp, Homo sapiens
catccttctatcttggagctt

SEQ ID NO: 44820 - RNA, 21 nt, RNAi
uccuucuaucuuggagcuuuu

SEQ ID NO: 44821 - RNA, 21 nt, RNAi
uuaggaagauagaaccucgaa

SEQ ID NO: 44822 - DNA, 21 bp, Homo sapiens
cataatggagaaatgaacagg

SEQ ID NO: 44823 - RNA, 21 nt, RNAi
uaauggagaaaugaacagguu

SEQ ID NO: 44824 - RNA, 21 nt, RNAi
uuauuaccucuuuacuugucc

SEQ ID NO: 44825 - DNA, 21 bp, Homo sapiens
caggtatctaaagaatagagt

SEQ ID NO: 44826 - RNA, 21 nt, RNAi
gguaucuaaagaauagaguuu

SEQ ID NO: 44827 - RNA, 21 nt, RNAi
uuccauagauuucuuaucuca

SEQ ID NO: 44828 - DNA, 21 bp, Homo sapiens
cacttcatgcaccagatcatc

SEQ ID NO: 44829 - RNA, 21 nt, RNAi
cuucaugcaccagaucaucuu

SEQ ID NO: 44830 - RNA, 21 nt, RNAi
uugaaguacguggucuaguag

SEQ ID NO: 44831 - DNA, 21 bp, Homo sapiens
catgcaccagatcatcacagg

SEQ ID NO: 44832 - RNA, 21 nt, RNAi
ugcaccagaucaucacagguu

SEQ ID NO: 44833 - RNA, 21 nt, RNAi
uuacguggucuaguagugucc

SEQ ID NO: 44834 - DNA, 21 bp, Homo sapiens
cattctcatggtatactacac

SEQ ID NO: 44835 - RNA, 21 nt, RNAi
uucucaugguauacuacacuu

SEQ ID NO: 44836 - RNA, 21 nt, RNAi
uuaagaguaccauaugaugug

SEQ ID NO: 44837 - DNA, 21 bp, Homo sapiens
cacactttctaacctcctact

SEQ ID NO: 44838 - RNA, 21 nt, RNAi
cacuuucuaaccuccuacuuu

SEQ ID NO: 44839 - RNA, 21 nt, RNAi
uugugaaagauuggaggauga

SEQ ID NO: 44840 - DNA, 21 bp, Homo sapiens
cactttctaacctcctactga

SEQ ID NO: 44841 - RNA, 21 nt, RNAi
cuuucuaaccuccuacugauu

SEQ ID NO: 44842 - RNA, 21 nt, RNAi
uugaaagauuggaggaugacu

SEQ ID NO: 44843 - DNA, 21 bp, Homo sapiens
cactatacattatgtggaact

SEQ ID NO: 44844 - RNA, 21 nt, RNAi
cuauacauuauguggaacuuu

SEQ ID NO: 44845 - RNA, 21 nt, RNAi
uugauauguaauacaccuuga

SEQ ID NO: 44846 - DNA, 21 bp, Homo sapiens
cattatgtggaactcctaact

SEQ ID NO: 44847 - RNA, 21 nt, RNAi
uuauguggaacuccuaacuuu

SEQ ID NO: 44848 - RNA, 21 nt, RNAi
uuaauacaccuugaggauuga

SEQ ID NO: 44849 - DNA, 21 bp, Homo sapiens
catttcaccagaaattgccac

SEQ ID NO: 44850 - RNA, 21 nt, RNAi
uuucaccagaaauugccacuu

SEQ ID NO: 44851 - RNA, 21 nt, RNAi
uuaaaguggucuuuaacggug

SEQ ID NO: 44852 - DNA, 21 bp, Homo sapiens
caccagaaattgccactcgaa

SEQ ID NO: 44853 - RNA, 21 nt, RNAi
ccagaaauugccacucgaauu

SEQ ID NO: 44854 - RNA, 21 nt, RNAi
uuggucuuuaacggugagcuu

SEQ ID NO: 44855 - DNA, 21 bp, Homo sapiens
cagaaattgccactcgaagtg

SEQ ID NO: 44856 - RNA, 21 nt, RNAi
gaaauugccacucgaaguguu

SEQ ID NO: 44857 - RNA, 21 nt, RNAi
uucuuuaacggugagcuucac

SEQ ID NO: 44858 - DNA, 21 bp, Homo sapiens
cactcgaagtgcacatggcct

SEQ ID NO: 44859 - RNA, 21 nt, RNAi
cucgaagugcacauggccuuu

SEQ ID NO: 44860 - RNA, 21 nt, RNAi
uugagcuucacguguaccgga

SEQ ID NO: 44861 - DNA, 21 bp, Homo sapiens
cacatggccttgaatctgatg

SEQ ID NO: 44862 - RNA, 21 nt, RNAi
cauggccuugaaucugauguu

SEQ ID NO: 44863 - RNA, 21 nt, RNAi
uuguaccggaacuuagacuac

SEQ ID NO: 44864 - DNA, 21 bp, Homo sapiens
catggccttgaatctgatgtt

SEQ ID NO: 44865 - RNA, 21 nt, RNAi
uggccuugaaucugauguuuu

SEQ ID NO: 44866 - RNA, 21 nt, RNAi
uuaccggaacuuagacuacaa

SEQ ID NO: 44867 - DNA, 21 bp, Homo sapiens
cactgacacagtcaagaacac

SEQ ID NO: 44868 - RNA, 21 nt, RNAi
cugacacagucaagaacacuu

SEQ ID NO: 44869 - RNA, 21 nt, RNAi
uugacugugucaguucuugug

SEQ ID NO: 44870 - DNA, 21 bp, Homo sapiens
cacagtcaagaacacattaaa

SEQ ID NO: 44871 - RNA, 21 nt, RNAi
cagucaagaacacauuaaauu

SEQ ID NO: 44872 - RNA, 21 nt, RNAi
uugucaguucuuguguaauuu

SEQ ID NO: 44873 - DNA, 21 bp, Homo sapiens
cagattatgaaatgccaactt

SEQ ID NO: 44874 - RNA, 21 nt, RNAi
gauuaugaaaugccaacuuuu

SEQ ID NO: 44875 - RNA, 21 nt, RNAi
uucuaauacuuuacgguugaa

SEQ ID NO: 44876 - DNA, 21 bp, Homo sapiens
caatagaggccaaggacctta

SEQ ID NO: 44877 - RNA, 21 nt, RNAi
auagaggccaaggaccuuauu

SEQ ID NO: 44878 - RNA, 21 nt, RNAi
uuuaucuccgguuccuggaau

SEQ ID NO: 44879 - DNA, 21 bp, Homo sapiens
caaggaccttattcaccagtt

SEQ ID NO: 44880 - RNA, 21 nt, RNAi
aggaccuuauucaccaguuuu

SEQ ID NO: 44881 - RNA, 21 nt, RNAi
uuuccuggaauaaguggucaa

SEQ ID NO: 44882 - DNA, 21 bp, Homo sapiens
caccagttacttcgtagaaat

SEQ ID NO: 44883 - RNA, 21 nt, RNAi
ccaguuacuucguagaaauuu

SEQ ID NO: 44884 - RNA, 21 nt, RNAi
uuggucaaugaagcaucuuua

SEQ ID NO: 44885 - DNA, 21 bp, Homo sapiens
cagttacttcgtagaaatcca

SEQ ID NO: 44886 - RNA, 21 nt, RNAi
guuacuucguagaaauccauu

SEQ ID NO: 44887 - RNA, 21 nt, RNAi
uucaaugaagcaucuuuaggu

SEQ ID NO: 44888 - DNA, 21 bp, Homo sapiens
cagcagatcgtttaagtctgt

SEQ ID NO: 44889 - RNA, 21 nt, RNAi
gcagaucguuuaagucuguuu

SEQ ID NO: 44890 - RNA, 21 nt, RNAi
uucgucuagcaaauucagaca

SEQ ID NO: 44891 - DNA, 21 bp, Homo sapiens
cagatcgtttaagtctgtctt

SEQ ID NO: 44892 - RNA, 21 nt, RNAi
gaucguuuaagucugucuuuu

SEQ ID NO: 44893 - RNA, 21 nt, RNAi
uucuagcaaauucagacagaa

SEQ ID NO: 44894 - DNA, 21 bp, Homo sapiens
catgccacaatttctactgca

SEQ ID NO: 44895 - RNA, 21 nt, RNAi
ugccacaauuucuacugcauu

SEQ ID NO: 44896 - RNA, 21 nt, RNAi
uuacgguguuaaagaugacgu

SEQ ID NO: 44897 - DNA, 21 bp, Homo sapiens
cacaatttctactgcaattac

SEQ ID NO: 44898 - RNA, 21 nt, RNAi
caauuucuacugcaauuacuu

SEQ ID NO: 44899 - RNA, 21 nt, RNAi
uuguuaaagaugacguuaaug

SEQ ID NO: 44900 - DNA, 21 bp, Homo sapiens
caatttctactgcaattacag

SEQ ID NO: 44901 - RNA, 21 nt, RNAi
auuucuacugcaauuacaguu

SEQ ID NO: 44902 - RNA, 21 nt, RNAi
uuuaaagaugacguuaauguc

SEQ ID NO: 44903 - DNA, 21 bp, Homo sapiens
caattacagcttcttccagta

SEQ ID NO: 44904 - RNA, 21 nt, RNAi
auuacagcuucuuccaguauu

SEQ ID NO: 44905 - RNA, 21 nt, RNAi
uuuaaugucgaagaaggucau

SEQ ID NO: 44906 - DNA, 21 bp, Homo sapiens
cagcttcttccagtaccagta

SEQ ID NO: 44907 - RNA, 21 nt, RNAi
gcuucuuccaguaccaguauu

SEQ ID NO: 44908 - RNA, 21 nt, RNAi
uucgaagaaggucauggucau

SEQ ID NO: 44909 - DNA, 21 bp, Homo sapiens
cagtaccagtataagtggtag

SEQ ID NO: 44910 - RNA, 21 nt, RNAi
guaccaguauaagugguaguu

SEQ ID NO: 44911 - RNA, 21 nt, RNAi
uucauggucauauucaccauc

SEQ ID NO: 44912 - DNA, 21 bp, Homo sapiens
caagaaaccagtaatagtgga

SEQ ID NO: 44913 - RNA, 21 nt, RNAi
agaaaccaguaauaguggauu

SEQ ID NO: 44914 - RNA, 21 nt, RNAi
uuucuuuggucauuaucaccu

SEQ ID NO: 44915 - DNA, 21 bp, Homo sapiens
caagatgcagaagaaaggcca

SEQ ID NO: 44916 - RNA, 21 nt, RNAi
agaugcagaagaaaggccauu

SEQ ID NO: 44917 - RNA, 21 nt, RNAi
uuucuacgucuucuuuccggu

SEQ ID NO: 44918 - DNA, 21 bp, Homo sapiens
cagaagaaaggccacattctc

SEQ ID NO: 44919 - RNA, 21 nt, RNAi
gaagaaaggccacauucucuu

SEQ ID NO: 44920 - RNA, 21 nt, RNAi
uucuucuuuccgguguaagag

SEQ ID NO: 44921 - DNA, 21 bp, Homo sapiens
cacattctcgataccttcgta

SEQ ID NO: 44922 - RNA, 21 nt, RNAi
cauucucgauaccuucguauu

SEQ ID NO: 44923 - RNA, 21 nt, RNAi
uuguaagagcuauggaagcau

SEQ ID NO: 44924 - DNA, 21 bp, Homo sapiens
cattctcgataccttcgtaga

SEQ ID NO: 44925 - RNA, 21 nt, RNAi
uucucgauaccuucguagauu

SEQ ID NO: 44926 - RNA, 21 nt, RNAi
uuaagagcuauggaagcaucu

SEQ ID NO: 44927 - DNA, 21 bp, Homo sapiens
cacttctaatagacagtctca

SEQ ID NO: 44928 - RNA, 21 nt, RNAi
cuucuaauagacagucucauu

SEQ ID NO: 44929 - RNA, 21 nt, RNAi
uugaagauuaucugucagagu

SEQ ID NO: 44930 - DNA, 21 bp, Homo sapiens
catatacaatggaacgatgtc

SEQ ID NO: 44931 - RNA, 21 nt, RNAi
uauacaauggaacgaugucuu

SEQ ID NO: 44932 - RNA, 21 nt, RNAi
uuauauguuaccuugcuacag

SEQ ID NO: 44933 - DNA, 21 bp, Homo sapiens
caatggaacgatgtcactcag

SEQ ID NO: 44934 - RNA, 21 nt, RNAi
auggaacgaugucacucaguu

SEQ ID NO: 44935 - RNA, 21 nt, RNAi
uuuaccuugcuacagugaguc

SEQ ID NO: 44936 - DNA, 21 bp, Homo sapiens
cactcagcagaaatgctttca

SEQ ID NO: 44937 - RNA, 21 nt, RNAi
cucagcagaaaugcuuucauu

SEQ ID NO: 44938 - RNA, 21 nt, RNAi
uugagucgucuuuacgaaagu

SEQ ID NO: 44939 - DNA, 21 bp, Homo sapiens
cagcagaaatgctttcagtgt

SEQ ID NO: 44940 - RNA, 21 nt, RNAi
gcagaaaugcuuucaguguuu

SEQ ID NO: 44941 - RNA, 21 nt, RNAi
uucgucuuuacgaaagucaca

SEQ ID NO: 44942 - DNA, 21 bp, Homo sapiens
cagaaatgctttcagtgtcca

SEQ ID NO: 44943 - RNA, 21 nt, RNAi
gaaaugcuuucaguguccauu

SEQ ID NO: 44944 - RNA, 21 nt, RNAi
uucuuuacgaaagucacaggu

SEQ ID NO: 44945 - DNA, 21 bp, Homo sapiens
cacagacaacaatgccaacat

SEQ ID NO: 44946 - RNA, 21 nt, RNAi
cagacaacaaugccaacauuu

SEQ ID NO: 44947 - RNA, 21 nt, RNAi
uugucuguuguuacgguugua

SEQ ID NO: 44948 - DNA, 21 bp, Homo sapiens
cagacaacaatgccaacattt

SEQ ID NO: 44949 - RNA, 21 nt, RNAi
gacaacaaugccaacauuuuu

SEQ ID NO: 44950 - RNA, 21 nt, RNAi
uucuguuguuacgguuguaaa

SEQ ID NO: 44951 - DNA, 21 bp, Homo sapiens
catccagtagttctggatctt

SEQ ID NO: 44952 - RNA, 21 nt, RNAi
uccaguaguucuggaucuuuu

SEQ ID NO: 44953 - RNA, 21 nt, RNAi
uuaggucaucaagaccuagaa

SEQ ID NO: 44954 - DNA, 21 bp, Homo sapiens
caatcaagcactctccaatca

SEQ ID NO: 44955 - RNA, 21 nt, RNAi
aucaagcacucuccaaucauu

SEQ ID NO: 44956 - RNA, 21 nt, RNAi
uuuaguucgugagagguuagu

SEQ ID NO: 44957 - DNA, 21 bp, Homo sapiens
caagcactctccaatcatctt

SEQ ID NO: 44958 - RNA, 21 nt, RNAi
agcacucuccaaucaucuuuu

SEQ ID NO: 44959 - RNA, 21 nt, RNAi
uuucgugagagguuaguagaa

SEQ ID NO: 44960 - DNA, 21 bp, Homo sapiens
cactctccaatcatctttgtc

SEQ ID NO: 44961 - RNA, 21 nt, RNAi
cucuccaaucaucuuugucuu

SEQ ID NO: 44962 - RNA, 21 nt, RNAi
uugagagguuaguagaaacag

SEQ ID NO: 44963 - DNA, 21 bp, Homo sapiens
caatcatctttgtccaggaaa

SEQ ID NO: 44964 - RNA, 21 nt, RNAi
aucaucuuuguccaggaaauu

SEQ ID NO: 44965 - RNA, 21 nt, RNAi
uuuaguagaaacagguccuuu

SEQ ID NO: 44966 - DNA, 21 bp, Homo sapiens
cacctcagactgaaaccgtac

SEQ ID NO: 44967 - RNA, 21 nt, RNAi
ccucagacugaaaccguacuu

SEQ ID NO: 44968 - RNA, 21 nt, RNAi
uuggagucugacuuuggcaug

SEQ ID NO: 44969 - DNA, 21 bp, Homo sapiens
cagactgaaaccgtacaacag

SEQ ID NO: 44970 - RNA, 21 nt, RNAi
gacugaaaccguacaacaguu

SEQ ID NO: 44971 - RNA, 21 nt, RNAi
uucugacuuuggcauguuguc

SEQ ID NO: 44972 - DNA, 21 bp, Homo sapiens
catccagatttgcagaaggac

SEQ ID NO: 44973 - RNA, 21 nt, RNAi
uccagauuugcagaaggacuu

SEQ ID NO: 44974 - RNA, 21 nt, RNAi
uuaggucuaaacgucuuccug

SEQ ID NO: 44975 - DNA, 21 bp, Homo sapiens
cagatttgcagaaggacacat

SEQ ID NO: 44976 - RNA, 21 nt, RNAi
gauuugcagaaggacacauuu

SEQ ID NO: 44977 - RNA, 21 nt, RNAi
uucuaaacgucuuccugugua

SEQ ID NO: 44978 - DNA, 21 bp, Homo sapiens
catgaaatatatgactgcact

SEQ ID NO: 44979 - RNA, 21 nt, RNAi
ugaaauauaugacugcacuuu

SEQ ID NO: 44980 - RNA, 21 nt, RNAi
uuacuuuauauacugacguga

SEQ ID NO: 44981 - DNA, 21 bp, Homo sapiens
cacttcacagtaaacctgaga

SEQ ID NO: 44982 - RNA, 21 nt, RNAi
cuucacaguaaaccugagauu

SEQ ID NO: 44983 - RNA, 21 nt, RNAi
uugaagugucauuuggacucu

SEQ ID NO: 44984 - DNA, 21 bp, Homo sapiens
cacagtaaacctgagataatc

SEQ ID NO: 44985 - RNA, 21 nt, RNAi
caguaaaccugagauaaucuu

SEQ ID NO: 44986 - RNA, 21 nt, RNAi
uugucauuuggacucuauuag

SEQ ID NO: 44987 - DNA, 21 bp, Homo sapiens
cagtaaacctgagataatcca

SEQ ID NO: 44988 - RNA, 21 nt, RNAi
guaaaccugagauaauccauu

SEQ ID NO: 44989 - RNA, 21 nt, RNAi
uucauuuggacucuauuaggu

SEQ ID NO: 44990 - DNA, 21 bp, Homo sapiens
cagatcctctttctgaacaga

SEQ ID NO: 44991 - RNA, 21 nt, RNAi
gauccucuuucugaacagauu

SEQ ID NO: 44992 - RNA, 21 nt, RNAi
uucuaggagaaagacuugucu

SEQ ID NO: 44993 - DNA, 21 bp, Homo sapiens
cagaatcgtacattaagaagc

SEQ ID NO: 44994 - RNA, 21 nt, RNAi
gaaucguacauuaagaagcuu

SEQ ID NO: 44995 - RNA, 21 nt, RNAi
uucuuagcauguaauucuucg

SEQ ID NO: 44996 - DNA, 21 bp, Homo sapiens
cattaagaagcattacatctc

SEQ ID NO: 44997 - RNA, 21 nt, RNAi
uuaagaagcauuacaucucuu

SEQ ID NO: 44998 - RNA, 21 nt, RNAi
uuaauucuucguaauguagag

SEQ ID NO: 44999 - DNA, 21 bp, Homo sapiens
cattacatctccgttggttgc

SEQ ID NO: 45000 - RNA, 21 nt, RNAi
uuacaucuccguugguugcuu

SEQ ID NO: 45001 - RNA, 21 nt, RNAi
uuaauguagaggcaaccaacg

SEQ ID NO: 45002 - DNA, 21 bp, Homo sapiens
catctccgttggttgctcaca

SEQ ID NO: 45003 - RNA, 21 nt, RNAi
ucuccguugguugcucacauu

SEQ ID NO: 45004 - RNA, 21 nt, RNAi
uuagaggcaaccaacgagugu

SEQ ID NO: 45005 - DNA, 21 bp, Homo sapiens
catacttgattcagaggaggt

SEQ ID NO: 45006 - RNA, 21 nt, RNAi
uacuugauucagaggagguuu

SEQ ID NO: 45007 - RNA, 21 nt, RNAi
uuaugaacuaagucuccucca

SEQ ID NO: 45008 - DNA, 21 bp, Homo sapiens
cagaggaggtgtgtgtggagc

SEQ ID NO: 45009 - RNA, 21 nt, RNAi
gaggagguguguguggagcuu

SEQ ID NO: 45010 - RNA, 21 nt, RNAi
uucuccuccacacacaccucg

SEQ ID NO: 45011 - DNA, 21 bp, Homo sapiens
catctcaagaatatgtgaaag

SEQ ID NO: 45012 - RNA, 21 nt, RNAi
ucucaagaauaugugaaaguu

SEQ ID NO: 45013 - RNA, 21 nt, RNAi
uuagaguucuuauacacuuuc

SEQ ID NO: 45014 - DNA, 21 bp, Homo sapiens
cagatatctagtgatggaaat

SEQ ID NO: 45015 - RNA, 21 nt, RNAi
gauaucuagugauggaaauuu

SEQ ID NO: 45016 - RNA, 21 nt, RNAi
uucuauagaucacuaccuuua

SEQ ID NO: 45017 - DNA, 21 bp, Homo sapiens
cacctactgacaacatcagta

SEQ ID NO: 45018 - RNA, 21 nt, RNAi
ccuacugacaacaucaguauu

SEQ ID NO: 45019 - RNA, 21 nt, RNAi
uuggaugacuguuguagucau

SEQ ID NO: 45020 - DNA, 21 bp, Homo sapiens
caacatcagtaggtacagctt

SEQ ID NO: 45021 - RNA, 21 nt, RNAi
acaucaguagguacagcuuuu

SEQ ID NO: 45022 - RNA, 21 nt, RNAi
uuuguagucauccaugucgaa

SEQ ID NO: 45023 - DNA, 21 bp, Homo sapiens
catcagtaggtacagctttga

SEQ ID NO: 45024 - RNA, 21 nt, RNAi
ucaguagguacagcuuugauu

SEQ ID NO: 45025 - RNA, 21 nt, RNAi
uuagucauccaugucgaaacu

SEQ ID NO: 45026 - DNA, 21 bp, Homo sapiens
cagtaggtacagctttgacaa

SEQ ID NO: 45027 - RNA, 21 nt, RNAi
guagguacagcuuugacaauu

SEQ ID NO: 45028 - RNA, 21 nt, RNAi
uucauccaugucgaaacuguu

SEQ ID NO: 45029 - DNA, 21 bp, Homo sapiens
cagctttgacaatttaccaga

SEQ ID NO: 45030 - RNA, 21 nt, RNAi
gcuuugacaauuuaccagauu

SEQ ID NO: 45031 - RNA, 21 nt, RNAi
uucgaaacuguuaaauggucu

SEQ ID NO: 45032 - DNA, 21 bp, Homo sapiens
caatatgcttccaggtttgta

SEQ ID NO: 45033 - RNA, 21 nt, RNAi
auaugcuuccagguuuguauu

SEQ ID NO: 45034 - RNA, 21 nt, RNAi
uuuauacgaagguccaaacau

SEQ ID NO: 45035 - DNA, 21 bp, Homo sapiens
caggtttgtacagcttctaag

SEQ ID NO: 45036 - RNA, 21 nt, RNAi
gguuuguacagcuucuaaguu

SEQ ID NO: 45037 - RNA, 21 nt, RNAi
uuccaaacaugucgaagauuc

SEQ ID NO: 45038 - DNA, 21 bp, Homo sapiens
cagcttctaagatctaaatct

SEQ ID NO: 45039 - RNA, 21 nt, RNAi
gcuucuaagaucuaaaucuuu

SEQ ID NO: 45040 - RNA, 21 nt, RNAi
uucgaagauucuagauuuaga

SEQ ID NO: 45041 - DNA, 21 bp, Homo sapiens
cagaagatttcattcaggtga

SEQ ID NO: 45042 - RNA, 21 nt, RNAi
gaagauuucauucaggugauu

SEQ ID NO: 45043 - RNA, 21 nt, RNAi
uucuucuaaaguaaguccacu

SEQ ID NO: 45044 - DNA, 21 bp, Homo sapiens
catcgtatttgtttagcactg

SEQ ID NO: 45045 - RNA, 21 nt, RNAi
ucguauuuguuuagcacuguu

SEQ ID NO: 45046 - RNA, 21 nt, RNAi
uuagcauaaacaaaucgugac

SEQ ID NO: 45047 - DNA, 21 bp, Homo sapiens
cactggaatccataatttcag

SEQ ID NO: 45048 - RNA, 21 nt, RNAi
cuggaauccauaauuucaguu

SEQ ID NO: 45049 - RNA, 21 nt, RNAi
uugaccuuagguauuaaaguc

SEQ ID NO: 45050 - DNA, 21 bp, Homo sapiens
cataatttcagaagaggaaag

SEQ ID NO: 45051 - RNA, 21 nt, RNAi
uaauuucagaagaggaaaguu

SEQ ID NO: 45052 - RNA, 21 nt, RNAi
uuauuaaagucuucuccuuuc

SEQ ID NO: 45053 - DNA, 21 bp, Homo sapiens
cacctaaggccttatcacctc

SEQ ID NO: 45054 - RNA, 21 nt, RNAi
ccuaaggccuuaucaccucuu

SEQ ID NO: 45055 - RNA, 21 nt, RNAi
uuggauuccggaauaguggag

SEQ ID NO: 45056 - DNA, 21 bp, Homo sapiens
cacctcctccttctgtggatt

SEQ ID NO: 45057 - RNA, 21 nt, RNAi
ccuccuccuucuguggauuuu

SEQ ID NO: 45058 - RNA, 21 nt, RNAi
uuggaggaggaagacaccuaa

SEQ ID NO: 45059 - DNA, 21 bp, Homo sapiens
caacgagagatagagcatctt

SEQ ID NO: 45060 - RNA, 21 nt, RNAi
acgagagauagagcaucuuuu

SEQ ID NO: 45061 - RNA, 21 nt, RNAi
uuugcucucuaucucguagaa

SEQ ID NO: 45062 - DNA, 21 bp, Homo sapiens
catctttcaacagaatggtca

SEQ ID NO: 45063 - RNA, 21 nt, RNAi
ucuuucaacagaauggucauu

SEQ ID NO: 45064 - RNA, 21 nt, RNAi
uuagaaaguugucuuaccagu

SEQ ID NO: 45065 - DNA, 21 bp, Homo sapiens
caacagaatggtcatgcatag

SEQ ID NO: 45066 - RNA, 21 nt, RNAi
acagaauggucaugcauaguu

SEQ ID NO: 45067 - RNA, 21 nt, RNAi
uuugucuuaccaguacguauc

SEQ ID NO: 45068 - DNA, 21 bp, Homo sapiens
cagaatggtcatgcatagtga

SEQ ID NO: 45069 - RNA, 21 nt, RNAi
gaauggucaugcauagugauu

SEQ ID NO: 45070 - RNA, 21 nt, RNAi
uucuuaccaguacguaucacu

SEQ ID NO: 45071 - DNA, 21 bp, Homo sapiens
catgcatagtgatgcttctcc

SEQ ID NO: 45072 - RNA, 21 nt, RNAi
ugcauagugaugcuucuccuu

SEQ ID NO: 45073 - RNA, 21 nt, RNAi
uuacguaucacuacgaagagg

SEQ ID NO: 45074 - DNA, 21 bp, Homo sapiens
catagtgatgcttctccaaca

SEQ ID NO: 45075 - RNA, 21 nt, RNAi
uagugaugcuucuccaacauu

SEQ ID NO: 45076 - RNA, 21 nt, RNAi
uuaucacuacgaagagguugu

SEQ ID NO: 45077 - DNA, 21 bp, Homo sapiens
caacacaggcaccaatcctta

SEQ ID NO: 45078 - RNA, 21 nt, RNAi
acacaggcaccaauccuuauu

SEQ ID NO: 45079 - RNA, 21 nt, RNAi
uuuguguccgugguuaggaau

SEQ ID NO: 45080 - DNA, 21 bp, Homo sapiens
cacaggcaccaatccttaatc

SEQ ID NO: 45081 - RNA, 21 nt, RNAi
caggcaccaauccuuaaucuu

SEQ ID NO: 45082 - RNA, 21 nt, RNAi
uuguccgugguuaggaauuag

SEQ ID NO: 45083 - DNA, 21 bp, Homo sapiens
caaatgaaggacttggtctta

SEQ ID NO: 45084 - RNA, 21 nt, RNAi
aaugaaggacuuggucuuauu

SEQ ID NO: 45085 - RNA, 21 nt, RNAi
uuuuacuuccugaaccagaau

SEQ ID NO: 45086 - DNA, 21 bp, Homo sapiens
caactacagcttctggaacag

SEQ ID NO: 45087 - RNA, 21 nt, RNAi
acuacagcuucuggaacaguu

SEQ ID NO: 45088 - RNA, 21 nt, RNAi
uuugaugucgaagaccuuguc

SEQ ID NO: 45089 - DNA, 21 bp, Homo sapiens
cagcttctggaacagacatct

SEQ ID NO: 45090 - RNA, 21 nt, RNAi
gcuucuggaacagacaucuuu

SEQ ID NO: 45091 - RNA, 21 nt, RNAi
uucgaagaccuugucuguaga

SEQ ID NO: 45092 - DNA, 21 bp, Homo sapiens
cagacatctcttctaatagtc

SEQ ID NO: 45093 - RNA, 21 nt, RNAi
gacaucucuucuaauagucuu

SEQ ID NO: 45094 - RNA, 21 nt, RNAi
uucuguagagaagauuaucag

SEQ ID NO: 45095 - DNA, 21 bp, Homo sapiens
cacagttaactagtggagctg

SEQ ID NO: 45096 - RNA, 21 nt, RNAi
caguuaacuaguggagcuguu

SEQ ID NO: 45097 - RNA, 21 nt, RNAi
uugucaauugaucaccucgac

SEQ ID NO: 45098 - DNA, 21 bp, Homo sapiens
cagttaactagtggagctgtg

SEQ ID NO: 45099 - RNA, 21 nt, RNAi
guuaacuaguggagcuguguu

SEQ ID NO: 45100 - RNA, 21 nt, RNAi
uucaauugaucaccucgacac

SEQ ID NO: 45101 - DNA, 21 bp, Homo sapiens
cagttggttgtgcaggcagga

SEQ ID NO: 45102 - RNA, 21 nt, RNAi
guugguugugcaggcaggauu

SEQ ID NO: 45103 - RNA, 21 nt, RNAi
uucaaccaacacguccguccu

SEQ ID NO: 45104 - DNA, 21 bp, Homo sapiens
caggcaggagtgtcttctatc

SEQ ID NO: 45105 - RNA, 21 nt, RNAi
ggcaggagugucuucuaucuu

SEQ ID NO: 45106 - RNA, 21 nt, RNAi
uuccguccucacagaagauag

SEQ ID NO: 45107 - DNA, 21 bp, Homo sapiens
caggagtgtcttctatcagtt

SEQ ID NO: 45108 - RNA, 21 nt, RNAi
ggagugucuucuaucaguuuu

SEQ ID NO: 45109 - RNA, 21 nt, RNAi
uuccucacagaagauagucaa

SEQ ID NO: 45110 - DNA, 21 bp, Homo sapiens
cagttatacctcaccaaatgg

SEQ ID NO: 45111 - RNA, 21 nt, RNAi
guuauaccucaccaaaugguu

SEQ ID NO: 45112 - RNA, 21 nt, RNAi
uucaauauggagugguuuacc

SEQ ID NO: 45113 - DNA, 21 bp, Homo sapiens
caccaaatggtcaaacaacta

SEQ ID NO: 45114 - RNA, 21 nt, RNAi
ccaaauggucaaacaacuauu

SEQ ID NO: 45115 - RNA, 21 nt, RNAi
uugguuuaccaguuuguugau

SEQ ID NO: 45116 - DNA, 21 bp, Homo sapiens
caaatggtcaaacaactaggt

SEQ ID NO: 45117 - RNA, 21 nt, RNAi
aauggucaaacaacuagguuu

SEQ ID NO: 45118 - RNA, 21 nt, RNAi
uuuuaccaguuuguugaucca

SEQ ID NO: 45119 - DNA, 21 bp, Homo sapiens
caaacaactaggtatggagaa

SEQ ID NO: 45120 - RNA, 21 nt, RNAi
aacaacuagguauggagaauu

SEQ ID NO: 45121 - RNA, 21 nt, RNAi
uuuuguugauccauaccucuu

SEQ ID NO: 45122 - DNA, 21 bp, Homo sapiens
cagactacatcaaacagaaat

SEQ ID NO: 45123 - RNA, 21 nt, RNAi
gacuacaucaaacagaaauuu

SEQ ID NO: 45124 - RNA, 21 nt, RNAi
uucugauguaguuugucuuua

SEQ ID NO: 45125 - DNA, 21 bp, Homo sapiens
catcaaacagaaattacagtg

SEQ ID NO: 45126 - RNA, 21 nt, RNAi
ucaaacagaaauuacaguguu

SEQ ID NO: 45127 - RNA, 21 nt, RNAi
uuaguuugucuuuaaugucac

SEQ ID NO: 45128 - DNA, 21 bp, Homo sapiens
caaacagaaattacagtgtct

SEQ ID NO: 45129 - RNA, 21 nt, RNAi
aacagaaauuacagugucuuu

SEQ ID NO: 45130 - RNA, 21 nt, RNAi
uuuugucuuuaaugucacaga

SEQ ID NO: 45131 - DNA, 21 bp, Homo sapiens
cagaaattacagtgtctgtct

SEQ ID NO: 45132 - RNA, 21 nt, RNAi
gaaauuacagugucugucuuu

SEQ ID NO: 45133 - RNA, 21 nt, RNAi
uucuuuaaugucacagacaga

SEQ ID NO: 45134 - DNA, 21 bp, Homo sapiens
cagtgtctgtcttccatcctt

SEQ ID NO: 45135 - RNA, 21 nt, RNAi
gugucugucuuccauccuuuu

SEQ ID NO: 45136 - RNA, 21 nt, RNAi
uucacagacagaagguaggaa

SEQ ID NO: 45137 - DNA, 21 bp, Homo sapiens
cataaagtcttcagaaagcct

SEQ ID NO: 45138 - RNA, 21 nt, RNAi
uaaagucuucagaaagccuuu

SEQ ID NO: 45139 - RNA, 21 nt, RNAi
uuauuucagaagucuuucgga

SEQ ID NO: 45140 - DNA, 21 bp, Homo sapiens
cagaaagcctttctatgaaag

SEQ ID NO: 45141 - RNA, 21 nt, RNAi
gaaagccuuucuaugaaaguu

SEQ ID NO: 45142 - RNA, 21 nt, RNAi
uucuuucggaaagauacuuuc

SEQ ID NO: 45143 - DNA, 21 bp, Homo sapiens
catgtatctgagataacaaag

SEQ ID NO: 45144 - RNA, 21 nt, RNAi
uguaucugagauaacaaaguu

SEQ ID NO: 45145 - RNA, 21 nt, RNAi
uuacauagacucuauuguuuc

SEQ ID NO: 45146 - DNA, 21 bp, Homo sapiens
caaagcagaatgaaacttgag

SEQ ID NO: 45147 - RNA, 21 nt, RNAi
aagcagaaugaaacuugaguu

SEQ ID NO: 45148 - RNA, 21 nt, RNAi
uuuucgucuuacuuugaacuc

SEQ ID NO: 45149 - DNA, 21 bp, Homo sapiens
cagaatgaaacttgagtcact

SEQ ID NO: 45150 - RNA, 21 nt, RNAi
gaaugaaacuugagucacuuu

SEQ ID NO: 45151 - RNA, 21 nt, RNAi
uucuuacuuugaacucaguga

SEQ ID NO: 45152 - DNA, 21 bp, Homo sapiens
cacctgactttgctcttagac

SEQ ID NO: 45153 - RNA, 21 nt, RNAi
ccugacuuugcucuuagacuu

SEQ ID NO: 45154 - RNA, 21 nt, RNAi
uuggacugaaacgagaaucug

SEQ ID NO: 45155 - DNA, 21 bp, Homo sapiens
gagaactttccgtggtttcag

SEQ ID NO: 45156 - RNA, 21 nt, RNAi
gaacuuuccgugguuucaguu

SEQ ID NO: 45157 - RNA, 21 nt, RNAi
uucuugaaaggcaccaaaguc

SEQ ID NO: 45158 - DNA, 21 bp, Homo sapiens
gaactttccgtggtttcagcg

SEQ ID NO: 45159 - RNA, 21 nt, RNAi
acuuuccgugguuucagcguu

SEQ ID NO: 45160 - RNA, 21 nt, RNAi
uuugaaaggcaccaaagucgc

SEQ ID NO: 45161 - DNA, 21 bp, Homo sapiens
gactgcgtaaggaagctaatc

SEQ ID NO: 45162 - RNA, 21 nt, RNAi
cugcguaaggaagcuaaucuu

SEQ ID NO: 45163 - RNA, 21 nt, RNAi
uugacgcauuccuucgauuag

SEQ ID NO: 45164 - DNA, 21 bp, Homo sapiens
gagcctgaaatatggcgacct

SEQ ID NO: 45165 - RNA, 21 nt, RNAi
gccugaaauauggcgaccuuu

SEQ ID NO: 45166 - RNA, 21 nt, RNAi
uucggacuuuauaccgcugga

SEQ ID NO: 45167 - DNA, 21 bp, Homo sapiens
gaaatatggcgacctgcatcg

SEQ ID NO: 45168 - RNA, 21 nt, RNAi
aauauggcgaccugcaucguu

SEQ ID NO: 45169 - RNA, 21 nt, RNAi
uuuuauaccgcuggacguagc

SEQ ID NO: 45170 - DNA, 21 bp, Homo sapiens
gaaatctgcttggtaaaggat

SEQ ID NO: 45171 - RNA, 21 nt, RNAi
aaucugcuugguaaaggauuu

SEQ ID NO: 45172 - RNA, 21 nt, RNAi
uuuuagacgaaccauuuccua

SEQ ID NO: 45173 - DNA, 21 bp, Homo sapiens
gatcatttgctggtgtctaca

SEQ ID NO: 45174 - RNA, 21 nt, RNAi
ucauuugcuggugucuacauu

SEQ ID NO: 45175 - RNA, 21 nt, RNAi
uuaguaaacgaccacagaugu

SEQ ID NO: 45176 - DNA, 21 bp, Homo sapiens
gagctgagtccattcacagtg

SEQ ID NO: 45177 - RNA, 21 nt, RNAi
gcugaguccauucacaguguu

SEQ ID NO: 45178 - RNA, 21 nt, RNAi
uucgacucagguaagugucac

SEQ ID NO: 45179 - DNA, 21 bp, Homo sapiens
gagtccattcacagtggtttg

SEQ ID NO: 45180 - RNA, 21 nt, RNAi
guccauucacagugguuuguu

SEQ ID NO: 45181 - RNA, 21 nt, RNAi
uucagguaagugucaccaaac

SEQ ID NO: 45182 - DNA, 21 bp, Homo sapiens
gatagataagaaagccatgta

SEQ ID NO: 45183 - RNA, 21 nt, RNAi
uagauaagaaagccauguauu

SEQ ID NO: 45184 - RNA, 21 nt, RNAi
uuaucuauucuuucgguacau

SEQ ID NO: 45185 - DNA, 21 bp, Homo sapiens
gataagaaagccatgtacaaa

SEQ ID NO: 45186 - RNA, 21 nt, RNAi
uaagaaagccauguacaaauu

SEQ ID NO: 45187 - RNA, 21 nt, RNAi
uuauucuuucgguacauguuu

SEQ ID NO: 45188 - DNA, 21 bp, Homo sapiens
gaaagccatgtacaaagcagg

SEQ ID NO: 45189 - RNA, 21 nt, RNAi
aagccauguacaaagcagguu

SEQ ID NO: 45190 - RNA, 21 nt, RNAi
uuuucgguacauguuucgucc

SEQ ID NO: 45191 - DNA, 21 bp, Homo sapiens
gaatggtacagagagtccaaa

SEQ ID NO: 45192 - RNA, 21 nt, RNAi
augguacagagaguccaaauu

SEQ ID NO: 45193 - RNA, 21 nt, RNAi
uuuaccaugucucucagguuu

SEQ ID NO: 45194 - DNA, 21 bp, Homo sapiens
gaaacatccttctatcttgga

SEQ ID NO: 45195 - RNA, 21 nt, RNAi
aacauccuucuaucuuggauu

SEQ ID NO: 45196 - RNA, 21 nt, RNAi
uuuuguaggaagauagaaccu

SEQ ID NO: 45197 - DNA, 21 bp, Homo sapiens
gatagcaattatgtgtatctg

SEQ ID NO: 45198 - RNA, 21 nt, RNAi
uagcaauuauguguaucuguu

SEQ ID NO: 45199 - RNA, 21 nt, RNAi
uuaucguuaauacacauagac

SEQ ID NO: 45200 - DNA, 21 bp, Homo sapiens
gaaatgtgccataatggagaa

SEQ ID NO: 45201 - RNA, 21 nt, RNAi
aaugugccauaauggagaauu

SEQ ID NO: 45202 - RNA, 21 nt, RNAi
uuuuacacgguauuaccucuu

SEQ ID NO: 45203 - DNA, 21 bp, Homo sapiens
gagaaatgaacaggtatctaa

SEQ ID NO: 45204 - RNA, 21 nt, RNAi
gaaaugaacagguaucuaauu

SEQ ID NO: 45205 - RNA, 21 nt, RNAi
uucuuuacuuguccauagauu

SEQ ID NO: 45206 - DNA, 21 bp, Homo sapiens
gaaatgaacaggtatctaaag

SEQ ID NO: 45207 - RNA, 21 nt, RNAi
aaugaacagguaucuaaaguu

SEQ ID NO: 45208 - RNA, 21 nt, RNAi
uuuuacuuguccauagauuuc

SEQ ID NO: 45209 - DNA, 21 bp, Homo sapiens
gaacaggtatctaaagaatag

SEQ ID NO: 45210 - RNA, 21 nt, RNAi
acagguaucuaaagaauaguu

SEQ ID NO: 45211 - RNA, 21 nt, RNAi
uuuguccauagauuucuuauc

SEQ ID NO: 45212 - DNA, 21 bp, Homo sapiens
gaagctcgacacttcatgcac

SEQ ID NO: 45213 - RNA, 21 nt, RNAi
agcucgacacuucaugcacuu

SEQ ID NO: 45214 - RNA, 21 nt, RNAi
uuucgagcugugaaguacgug

SEQ ID NO: 45215 - DNA, 21 bp, Homo sapiens
gacacttcatgcaccagatca

SEQ ID NO: 45216 - RNA, 21 nt, RNAi
cacuucaugcaccagaucauu

SEQ ID NO: 45217 - RNA, 21 nt, RNAi
uugugaaguacguggucuagu

SEQ ID NO: 45218 - DNA, 21 bp, Homo sapiens
gatgttgtatcttcattctca

SEQ ID NO: 45219 - RNA, 21 nt, RNAi
uguuguaucuucauucucauu

SEQ ID NO: 45220 - RNA, 21 nt, RNAi
uuacaacauagaaguaagagu

SEQ ID NO: 45221 - DNA, 21 bp, Homo sapiens
gacctcacactttctaacctc

SEQ ID NO: 45222 - RNA, 21 nt, RNAi
ccucacacuuucuaaccucuu

SEQ ID NO: 45223 - RNA, 21 nt, RNAi
uuggagugugaaagauuggag

SEQ ID NO: 45224 - DNA, 21 bp, Homo sapiens
gactcgtaatatgaacatcaa

SEQ ID NO: 45225 - RNA, 21 nt, RNAi
cucguaauaugaacaucaauu

SEQ ID NO: 45226 - RNA, 21 nt, RNAi
uugagcauuauacuuguaguu

SEQ ID NO: 45227 - DNA, 21 bp, Homo sapiens
gaacatcaagattgctgattt

SEQ ID NO: 45228 - RNA, 21 nt, RNAi
acaucaagauugcugauuuuu

SEQ ID NO: 45229 - RNA, 21 nt, RNAi
uuuguaguucuaacgacuaaa

SEQ ID NO: 45230 - DNA, 21 bp, Homo sapiens
gaactcctaactacatttcac

SEQ ID NO: 45231 - RNA, 21 nt, RNAi
acuccuaacuacauuucacuu

SEQ ID NO: 45232 - RNA, 21 nt, RNAi
uuugaggauugauguaaagug

SEQ ID NO: 45233 - DNA, 21 bp, Homo sapiens
gaaattgccactcgaagtgca

SEQ ID NO: 45234 - RNA, 21 nt, RNAi
aauugccacucgaagugcauu

SEQ ID NO: 45235 - RNA, 21 nt, RNAi
uuuuaacggugagcuucacgu

SEQ ID NO: 45236 - DNA, 21 bp, Homo sapiens
gaagtgcacatggccttgaat

SEQ ID NO: 45237 - RNA, 21 nt, RNAi
agugcacauggccuugaauuu

SEQ ID NO: 45238 - RNA, 21 nt, RNAi
uuucacguguaccggaacuua

SEQ ID NO: 45239 - DNA, 21 bp, Homo sapiens
gacactgacacagtcaagaac

SEQ ID NO: 45240 - RNA, 21 nt, RNAi
cacugacacagucaagaacuu

SEQ ID NO: 45241 - RNA, 21 nt, RNAi
uugugacugugucaguucuug

SEQ ID NO: 45242 - DNA, 21 bp, Homo sapiens
gacacagtcaagaacacatta

SEQ ID NO: 45243 - RNA, 21 nt, RNAi
cacagucaagaacacauuauu

SEQ ID NO: 45244 - RNA, 21 nt, RNAi
uugugucaguucuuguguaau

SEQ ID NO: 45245 - DNA, 21 bp, Homo sapiens
gaggccaaggaccttattcac

SEQ ID NO: 45246 - RNA, 21 nt, RNAi
ggccaaggaccuuauucacuu

SEQ ID NO: 45247 - RNA, 21 nt, RNAi
uuccgguuccuggaauaagug

SEQ ID NO: 45248 - DNA, 21 bp, Homo sapiens
gaccttattcaccagttactt

SEQ ID NO: 45249 - RNA, 21 nt, RNAi
ccuuauucaccaguuacuuuu

SEQ ID NO: 45250 - RNA, 21 nt, RNAi
uuggaauaaguggucaaugaa

SEQ ID NO: 45251 - DNA, 21 bp, Homo sapiens
gaaatccagcagatcgtttaa

SEQ ID NO: 45252 - RNA, 21 nt, RNAi
aauccagcagaucguuuaauu

SEQ ID NO: 45253 - RNA, 21 nt, RNAi
uuuuaggucgucuagcaaauu

SEQ ID NO: 45254 - DNA, 21 bp, Homo sapiens
gatcgtttaagtctgtcttca

SEQ ID NO: 45255 - RNA, 21 nt, RNAi
ucguuuaagucugucuucauu

SEQ ID NO: 45256 - RNA, 21 nt, RNAi
uuagcaaauucagacagaagu

SEQ ID NO: 45257 - DNA, 21 bp, Homo sapiens
gatttaggaactgtggaagac

SEQ ID NO: 45258 - RNA, 21 nt, RNAi
uuuaggaacuguggaagacuu

SEQ ID NO: 45259 - RNA, 21 nt, RNAi
uuaaauccuugacaccuucug

SEQ ID NO: 45260 - DNA, 21 bp, Homo sapiens
gaactgtggaagactcaattg

SEQ ID NO: 45261 - RNA, 21 nt, RNAi
acuguggaagacucaauuguu

SEQ ID NO: 45262 - RNA, 21 nt, RNAi
uuugacaccuucugaguuaac

SEQ ID NO: 45263 - DNA, 21 bp, Homo sapiens
gaaaccagtaatagtggaagg

SEQ ID NO: 45264 - RNA, 21 nt, RNAi
aaccaguaauaguggaagguu

SEQ ID NO: 45265 - RNA, 21 nt, RNAi
uuuuggucauuaucaccuucc

SEQ ID NO: 45266 - DNA, 21 bp, Homo sapiens
gaagagtaattcaagatgcag

SEQ ID NO: 45267 - RNA, 21 nt, RNAi
agaguaauucaagaugcaguu

SEQ ID NO: 45268 - RNA, 21 nt, RNAi
uuucucauuaaguucuacguc

SEQ ID NO: 45269 - DNA, 21 bp, Homo sapiens
gagtaattcaagatgcagaag

SEQ ID NO: 45270 - RNA, 21 nt, RNAi
guaauucaagaugcagaaguu

SEQ ID NO: 45271 - RNA, 21 nt, RNAi
uucauuaaguucuacgucuuc

SEQ ID NO: 45272 - DNA, 21 bp, Homo sapiens
gatgcagaagaaaggccacat

SEQ ID NO: 45273 - RNA, 21 nt, RNAi
ugcagaagaaaggccacauuu

SEQ ID NO: 45274 - RNA, 21 nt, RNAi
uuacgucuucuuuccggugua

SEQ ID NO: 45275 - DNA, 21 bp, Homo sapiens
gaagaaaggccacattctcga

SEQ ID NO: 45276 - RNA, 21 nt, RNAi
agaaaggccacauucucgauu

SEQ ID NO: 45277 - RNA, 21 nt, RNAi
uuucuuuccgguguaagagcu

SEQ ID NO: 45278 - DNA, 21 bp, Homo sapiens
gaaaggccacattctcgatac

SEQ ID NO: 45279 - RNA, 21 nt, RNAi
aaggccacauucucgauacuu

SEQ ID NO: 45280 - RNA, 21 nt, RNAi
uuuuccgguguaagagcuaug

SEQ ID NO: 45281 - DNA, 21 bp, Homo sapiens
gataccttcgtagagcttatt

SEQ ID NO: 45282 - RNA, 21 nt, RNAi
uaccuucguagagcuuauuuu

SEQ ID NO: 45283 - RNA, 21 nt, RNAi
uuauggaagcaucucgaauaa

SEQ ID NO: 45284 - DNA, 21 bp, Homo sapiens
gagcttattcctctgatagat

SEQ ID NO: 45285 - RNA, 21 nt, RNAi
gcuuauuccucugauagauuu

SEQ ID NO: 45286 - RNA, 21 nt, RNAi
uucgaauaaggagacuaucua

SEQ ID NO: 45287 - DNA, 21 bp, Homo sapiens
gatagatctggcacttctaat

SEQ ID NO: 45288 - RNA, 21 nt, RNAi
uagaucuggcacuucuaauuu

SEQ ID NO: 45289 - RNA, 21 nt, RNAi
uuaucuagaccgugaagauua

SEQ ID NO: 45290 - DNA, 21 bp, Homo sapiens
gatctggcacttctaatagac

SEQ ID NO: 45291 - RNA, 21 nt, RNAi
ucuggcacuucuaauagacuu

SEQ ID NO: 45292 - RNA, 21 nt, RNAi
uuagaccgugaagauuaucug

SEQ ID NO: 45293 - DNA, 21 bp, Homo sapiens
gaacgatgtcactcagcagaa

SEQ ID NO: 45294 - RNA, 21 nt, RNAi
acgaugucacucagcagaauu

SEQ ID NO: 45295 - RNA, 21 nt, RNAi
uuugcuacagugagucgucuu

SEQ ID NO: 45296 - DNA, 21 bp, Homo sapiens
gatgtcactcagcagaaatgc

SEQ ID NO: 45297 - RNA, 21 nt, RNAi
ugucacucagcagaaaugcuu

SEQ ID NO: 45298 - RNA, 21 nt, RNAi
uuacagugagucgucuuuacg

SEQ ID NO: 45299 - DNA, 21 bp, Homo sapiens
gaaatgctttcagtgtccaaa

SEQ ID NO: 45300 - RNA, 21 nt, RNAi
aaugcuuucaguguccaaauu

SEQ ID NO: 45301 - RNA, 21 nt, RNAi
uuuuacgaaagucacagguuu

SEQ ID NO: 45302 - DNA, 21 bp, Homo sapiens
gacatccagtagttctggatc

SEQ ID NO: 45303 - RNA, 21 nt, RNAi
cauccaguaguucuggaucuu

SEQ ID NO: 45304 - RNA, 21 nt, RNAi
uuguaggucaucaagaccuag

SEQ ID NO: 45305 - DNA, 21 bp, Homo sapiens
gaaagacctgataacaatcaa

SEQ ID NO: 45306 - RNA, 21 nt, RNAi
aagaccugauaacaaucaauu

SEQ ID NO: 45307 - RNA, 21 nt, RNAi
uuuucuggacuauuguuaguu

SEQ ID NO: 45308 - DNA, 21 bp, Homo sapiens
gacctgataacaatcaagcac

SEQ ID NO: 45309 - RNA, 21 nt, RNAi
ccugauaacaaucaagcacuu

SEQ ID NO: 45310 - RNA, 21 nt, RNAi
uuggacuauuguuaguucgug

SEQ ID NO: 45311 - DNA, 21 bp, Homo sapiens
gataacaatcaagcactctcc

SEQ ID NO: 45312 - RNA, 21 nt, RNAi
uaacaaucaagcacucuccuu

SEQ ID NO: 45313 - RNA, 21 nt, RNAi
uuauuguuaguucgugagagg

SEQ ID NO: 45314 - DNA, 21 bp, Homo sapiens
gacacctcagactgaaaccgt

SEQ ID NO: 45315 - RNA, 21 nt, RNAi
caccucagacugaaaccguuu

SEQ ID NO: 45316 - RNA, 21 nt, RNAi
uuguggagucugacuuuggca

SEQ ID NO: 45317 - DNA, 21 bp, Homo sapiens
gactgaaaccgtacaacagtg

SEQ ID NO: 45318 - RNA, 21 nt, RNAi
cugaaaccguacaacaguguu

SEQ ID NO: 45319 - RNA, 21 nt, RNAi
uugacuuuggcauguugucac

SEQ ID NO: 45320 - DNA, 21 bp, Homo sapiens
gaaaccgtacaacagtggttt

SEQ ID NO: 45321 - RNA, 21 nt, RNAi
aaccguacaacagugguuuuu

SEQ ID NO: 45322 - RNA, 21 nt, RNAi
uuuuggcauguugucaccaaa

SEQ ID NO: 45323 - DNA, 21 bp, Homo sapiens
gaatctgcaaataaatgctca

SEQ ID NO: 45324 - RNA, 21 nt, RNAi
aucugcaaauaaaugcucauu

SEQ ID NO: 45325 - RNA, 21 nt, RNAi
uuuagacguuuauuuacgagu

SEQ ID NO: 45326 - DNA, 21 bp, Homo sapiens
gatttgcagaaggacacatca

SEQ ID NO: 45327 - RNA, 21 nt, RNAi
uuugcagaaggacacaucauu

SEQ ID NO: 45328 - RNA, 21 nt, RNAi
uuaaacgucuuccuguguagu

SEQ ID NO: 45329 - DNA, 21 bp, Homo sapiens
gaactctgatgcttctgataa

SEQ ID NO: 45330 - RNA, 21 nt, RNAi
acucugaugcuucugauaauu

SEQ ID NO: 45331 - RNA, 21 nt, RNAi
uuugagacuacgaagacuauu

SEQ ID NO: 45332 - DNA, 21 bp, Homo sapiens
gatgcttctgataatgcacat

SEQ ID NO: 45333 - RNA, 21 nt, RNAi
ugcuucugauaaugcacauuu

SEQ ID NO: 45334 - RNA, 21 nt, RNAi
uuacgaagacuauuacgugua

SEQ ID NO: 45335 - DNA, 21 bp, Homo sapiens
gaaatatatgactgcacttca

SEQ ID NO: 45336 - RNA, 21 nt, RNAi
aauauaugacugcacuucauu

SEQ ID NO: 45337 - RNA, 21 nt, RNAi
uuuuauauacugacgugaagu

SEQ ID NO: 45338 - DNA, 21 bp, Homo sapiens
gactgcacttcacagtaaacc

SEQ ID NO: 45339 - RNA, 21 nt, RNAi
cugcacuucacaguaaaccuu

SEQ ID NO: 45340 - RNA, 21 nt, RNAi
uugacgugaagugucauuugg

SEQ ID NO: 45341 - DNA, 21 bp, Homo sapiens
gagataatccaacaagaatgt

SEQ ID NO: 45342 - RNA, 21 nt, RNAi
gauaauccaacaagaauguuu

SEQ ID NO: 45343 - RNA, 21 nt, RNAi
uucuauuagguuguucuuaca

SEQ ID NO: 45344 - DNA, 21 bp, Homo sapiens
gataatccaacaagaatgtgt

SEQ ID NO: 45345 - RNA, 21 nt, RNAi
uaauccaacaagaauguguuu

SEQ ID NO: 45346 - RNA, 21 nt, RNAi
uuauuagguuguucuuacaca

SEQ ID NO: 45347 - DNA, 21 bp, Homo sapiens
gatcctctttctgaacagagc

SEQ ID NO: 45348 - RNA, 21 nt, RNAi
uccucuuucugaacagagcuu

SEQ ID NO: 45349 - RNA, 21 nt, RNAi
uuaggagaaagacuugucucg

SEQ ID NO: 45350 - DNA, 21 bp, Homo sapiens
gaatcgtacattaagaagcat

SEQ ID NO: 45351 - RNA, 21 nt, RNAi
aucguacauuaagaagcauuu

SEQ ID NO: 45352 - RNA, 21 nt, RNAi
uuuagcauguaauucuucgua

SEQ ID NO: 45353 - DNA, 21 bp, Homo sapiens
gaagcattacatctccgttgg

SEQ ID NO: 45354 - RNA, 21 nt, RNAi
agcauuacaucuccguugguu

SEQ ID NO: 45355 - RNA, 21 nt, RNAi
uuucguaauguagaggcaacc

SEQ ID NO: 45356 - DNA, 21 bp, Homo sapiens
gagcatacttgattcagagga

SEQ ID NO: 45357 - RNA, 21 nt, RNAi
gcauacuugauucagaggauu

SEQ ID NO: 45358 - RNA, 21 nt, RNAi
uucguaugaacuaagucuccu

SEQ ID NO: 45359 - DNA, 21 bp, Homo sapiens
gattcagaggaggtgtgtgtg

SEQ ID NO: 45360 - RNA, 21 nt, RNAi
uucagaggagguguguguguu

SEQ ID NO: 45361 - RNA, 21 nt, RNAi
uuaagucuccuccacacacac

SEQ ID NO: 45362 - DNA, 21 bp, Homo sapiens
gaggaggtgtgtgtggagctt

SEQ ID NO: 45363 - RNA, 21 nt, RNAi
ggagguguguguggagcuuuu

SEQ ID NO: 45364 - RNA, 21 nt, RNAi
uuccuccacacacaccucgaa

SEQ ID NO: 45365 - DNA, 21 bp, Homo sapiens
gaggtgtgtgtggagcttgta

SEQ ID NO: 45366 - RNA, 21 nt, RNAi
gguguguguggagcuuguauu

SEQ ID NO: 45367 - RNA, 21 nt, RNAi
uuccacacacaccucgaacau

SEQ ID NO: 45368 - DNA, 21 bp, Homo sapiens
gagcttgtaaaggagtatgca

SEQ ID NO: 45369 - RNA, 21 nt, RNAi
gcuuguaaaggaguaugcauu

SEQ ID NO: 45370 - RNA, 21 nt, RNAi
uucgaacauuuccucauacgu

SEQ ID NO: 45371 - DNA, 21 bp, Homo sapiens
gagtatgcatctcaagaatat

SEQ ID NO: 45372 - RNA, 21 nt, RNAi
guaugcaucucaagaauauuu

SEQ ID NO: 45373 - RNA, 21 nt, RNAi
uucauacguagaguucuuaua

SEQ ID NO: 45374 - DNA, 21 bp, Homo sapiens
gaaagaagttcttcagatatc

SEQ ID NO: 45375 - RNA, 21 nt, RNAi
aagaaguucuucagauaucuu

SEQ ID NO: 45376 - RNA, 21 nt, RNAi
uuuucuucaagaagucuauag

SEQ ID NO: 45377 - DNA, 21 bp, Homo sapiens
gaagttcttcagatatctagt

SEQ ID NO: 45378 - RNA, 21 nt, RNAi
aguucuucagauaucuaguuu

SEQ ID NO: 45379 - RNA, 21 nt, RNAi
uuucaagaagucuauagauca

SEQ ID NO: 45380 - DNA, 21 bp, Homo sapiens
gatatctagtgatggaaatac

SEQ ID NO: 45381 - RNA, 21 nt, RNAi
uaucuagugauggaaauacuu

SEQ ID NO: 45382 - RNA, 21 nt, RNAi
uuauagaucacuaccuuuaug

SEQ ID NO: 45383 - DNA, 21 bp, Homo sapiens
gatggaaatacgatcactatt

SEQ ID NO: 45384 - RNA, 21 nt, RNAi
uggaaauacgaucacuauuuu

SEQ ID NO: 45385 - RNA, 21 nt, RNAi
uuaccuuuaugcuagugauaa

SEQ ID NO: 45386 - DNA, 21 bp, Homo sapiens
gacaacatcagtaggtacagc

SEQ ID NO: 45387 - RNA, 21 nt, RNAi
caacaucaguagguacagcuu

SEQ ID NO: 45388 - RNA, 21 nt, RNAi
uuguuguagucauccaugucg

SEQ ID NO: 45389 - DNA, 21 bp, Homo sapiens
gatggagaattctcctggtgc

SEQ ID NO: 45390 - RNA, 21 nt, RNAi
uggagaauucuccuggugcuu

SEQ ID NO: 45391 - RNA, 21 nt, RNAi
uuaccucuuaagaggaccacg

SEQ ID NO: 45392 - DNA, 21 bp, Homo sapiens
gagaattctcctggtgctgat

SEQ ID NO: 45393 - RNA, 21 nt, RNAi
gaauucuccuggugcugauuu

SEQ ID NO: 45394 - RNA, 21 nt, RNAi
uucuuaagaggaccacgacua

SEQ ID NO: 45395 - DNA, 21 bp, Homo sapiens
gaattctcctggtgctgattt

SEQ ID NO: 45396 - RNA, 21 nt, RNAi
auucuccuggugcugauuuuu

SEQ ID NO: 45397 - RNA, 21 nt, RNAi
uuuaagaggaccacgacuaaa

SEQ ID NO: 45398 - DNA, 21 bp, Homo sapiens
gaagatttcattcaggtgatt

SEQ ID NO: 45399 - RNA, 21 nt, RNAi
agauuucauucaggugauuuu

SEQ ID NO: 45400 - RNA, 21 nt, RNAi
uuucuaaaguaaguccacuaa

SEQ ID NO: 45401 - DNA, 21 bp, Homo sapiens
gatttcattcaggtgattgaa

SEQ ID NO: 45402 - RNA, 21 nt, RNAi
uuucauucaggugauugaauu

SEQ ID NO: 45403 - RNA, 21 nt, RNAi
uuaaaguaaguccacuaacuu

SEQ ID NO: 45404 - DNA, 21 bp, Homo sapiens
gaaagtgaagttaatagcttg

SEQ ID NO: 45405 - RNA, 21 nt, RNAi
aagugaaguuaauagcuuguu

SEQ ID NO: 45406 - RNA, 21 nt, RNAi
uuuucacuucaauuaucgaac

SEQ ID NO: 45407 - DNA, 21 bp, Homo sapiens
gaagttaatagcttgaaagag

SEQ ID NO: 45408 - RNA, 21 nt, RNAi
aguuaauagcuugaaagaguu

SEQ ID NO: 45409 - RNA, 21 nt, RNAi
uuucaauuaucgaacuuucuc

SEQ ID NO: 45410 - DNA, 21 bp, Homo sapiens
gaatccataatttcagaagag

SEQ ID NO: 45411 - RNA, 21 nt, RNAi
auccauaauuucagaagaguu

SEQ ID NO: 45412 - RNA, 21 nt, RNAi
uuuagguauuaaagucuucuc

SEQ ID NO: 45413 - DNA, 21 bp, Homo sapiens
gagagatagagcatctttcaa

SEQ ID NO: 45414 - RNA, 21 nt, RNAi
gagauagagcaucuuucaauu

SEQ ID NO: 45415 - RNA, 21 nt, RNAi
uucucuaucucguagaaaguu

SEQ ID NO: 45416 - DNA, 21 bp, Homo sapiens
gagatagagcatctttcaaca

SEQ ID NO: 45417 - RNA, 21 nt, RNAi
gauagagcaucuuucaacauu

SEQ ID NO: 45418 - RNA, 21 nt, RNAi
uucuaucucguagaaaguugu

SEQ ID NO: 45419 - DNA, 21 bp, Homo sapiens
gatagagcatctttcaacaga

SEQ ID NO: 45420 - RNA, 21 nt, RNAi
uagagcaucuuucaacagauu

SEQ ID NO: 45421 - RNA, 21 nt, RNAi
uuaucucguagaaaguugucu

SEQ ID NO: 45422 - DNA, 21 bp, Homo sapiens
gagcatctttcaacagaatgg

SEQ ID NO: 45423 - RNA, 21 nt, RNAi
gcaucuuucaacagaaugguu

SEQ ID NO: 45424 - RNA, 21 nt, RNAi
uucguagaaaguugucuuacc

SEQ ID NO: 45425 - DNA, 21 bp, Homo sapiens
gaatggtcatgcatagtgatg

SEQ ID NO: 45426 - RNA, 21 nt, RNAi
auggucaugcauagugauguu

SEQ ID NO: 45427 - RNA, 21 nt, RNAi
uuuaccaguacguaucacuac

SEQ ID NO: 45428 - DNA, 21 bp, Homo sapiens
gatgcttctccaacacaggca

SEQ ID NO: 45429 - RNA, 21 nt, RNAi
ugcuucuccaacacaggcauu

SEQ ID NO: 45430 - RNA, 21 nt, RNAi
uuacgaagagguuguguccgu

SEQ ID NO: 45431 - DNA, 21 bp, Homo sapiens
gaaggacttggtcttacaact

SEQ ID NO: 45432 - RNA, 21 nt, RNAi
aggacuuggucuuacaacuuu

SEQ ID NO: 45433 - RNA, 21 nt, RNAi
uuuccugaaccagaauguuga

SEQ ID NO: 45434 - DNA, 21 bp, Homo sapiens
gacttggtcttacaactacag

SEQ ID NO: 45435 - RNA, 21 nt, RNAi
cuuggucuuacaacuacaguu

SEQ ID NO: 45436 - RNA, 21 nt, RNAi
uugaaccagaauguugauguc

SEQ ID NO: 45437 - DNA, 21 bp, Homo sapiens
gaacagacatctcttctaata

SEQ ID NO: 45438 - RNA, 21 nt, RNAi
acagacaucucuucuaauauu

SEQ ID NO: 45439 - RNA, 21 nt, RNAi
uuugucuguagagaagauuau

SEQ ID NO: 45440 - DNA, 21 bp, Homo sapiens
gacatctcttctaatagtcta

SEQ ID NO: 45441 - RNA, 21 nt, RNAi
caucucuucuaauagucuauu

SEQ ID NO: 45442 - RNA, 21 nt, RNAi
uuguagagaagauuaucagau

SEQ ID NO: 45443 - DNA, 21 bp, Homo sapiens
gattgtcttcctaaatcagca

SEQ ID NO: 45444 - RNA, 21 nt, RNAi
uugucuuccuaaaucagcauu

SEQ ID NO: 45445 - RNA, 21 nt, RNAi
uuaacagaaggauuuagucgu

SEQ ID NO: 45446 - DNA, 21 bp, Homo sapiens
gagtgtcttctatcagttata

SEQ ID NO: 45447 - RNA, 21 nt, RNAi
gugucuucuaucaguuauauu

SEQ ID NO: 45448 - RNA, 21 nt, RNAi
uucacagaagauagucaauau

SEQ ID NO: 45449 - DNA, 21 bp, Homo sapiens
gaaattacagtgtctgtcttc

SEQ ID NO: 45450 - RNA, 21 nt, RNAi
aauuacagugucugucuucuu

SEQ ID NO: 45451 - RNA, 21 nt, RNAi
uuuuaaugucacagacagaag

SEQ ID NO: 45452 - DNA, 21 bp, Homo sapiens
gaaagcctttctatgaaagaa

SEQ ID NO: 45453 - RNA, 21 nt, RNAi
aagccuuucuaugaaagaauu

SEQ ID NO: 45454 - RNA, 21 nt, RNAi
uuuucggaaagauacuuucuu

SEQ ID NO: 45455 - DNA, 21 bp, Homo sapiens
gagataacaaagcagaatgaa

SEQ ID NO: 45456 - RNA, 21 nt, RNAi
gauaacaaagcagaaugaauu

SEQ ID NO: 45457 - RNA, 21 nt, RNAi
uucuauuguuucgucuuacuu

SEQ ID NO: 45458 - DNA, 21 bp, Homo sapiens
gataacaaagcagaatgaaac

SEQ ID NO: 45459 - RNA, 21 nt, RNAi
uaacaaagcagaaugaaacuu

SEQ ID NO: 45460 - RNA, 21 nt, RNAi
uuauuguuucgucuuacuuug

SEQ ID NO: 45461 - DNA, 21 bp, Homo sapiens
gaatgaaacttgagtcactta

SEQ ID NO: 45462 - RNA, 21 nt, RNAi
augaaacuugagucacuuauu

SEQ ID NO: 45463 - RNA, 21 nt, RNAi
uuuacuuugaacucagugaau

SEQ ID NO: 45464 - DNA, 21 bp, Homo sapiens
gaaacttgagtcacttactaa

SEQ ID NO: 45465 - RNA, 21 nt, RNAi
aacuugagucacuuacuaauu

SEQ ID NO: 45466 - RNA, 21 nt, RNAi
uuuugaacucagugaaugauu

SEQ ID NO: 45467 - DNA, 21 bp, Homo sapiens
gaacacctgactttgctctta

SEQ ID NO: 45468 - RNA, 21 nt, RNAi
acaccugacuuugcucuuauu

SEQ ID NO: 45469 - RNA, 21 nt, RNAi
uuuguggacugaaacgagaau

SEQ ID NO: 45470 - DNA, 21 bp, Homo sapiens
taaggaagctaatccggagaa

SEQ ID NO: 45471 - RNA, 21 nt, RNAi
aggaagcuaauccggagaauu

SEQ ID NO: 45472 - RNA, 21 nt, RNAi
uuuccuucgauuaggccucuu

SEQ ID NO: 45473 - DNA, 21 bp, Homo sapiens
taaagttggaaatctgcttgg

SEQ ID NO: 45474 - RNA, 21 nt, RNAi
aaguuggaaaucugcuugguu

SEQ ID NO: 45475 - RNA, 21 nt, RNAi
uuuucaaccuuuagacgaacc

SEQ ID NO: 45476 - DNA, 21 bp, Homo sapiens
taaaggatcatttgctggtgt

SEQ ID NO: 45477 - RNA, 21 nt, RNAi
aaggaucauuugcugguguuu

SEQ ID NO: 45478 - RNA, 21 nt, RNAi
uuuuccuaguaaacgaccaca

SEQ ID NO: 45479 - DNA, 21 bp, Homo sapiens
tacagagctgagtccattcac

SEQ ID NO: 45480 - RNA, 21 nt, RNAi
cagagcugaguccauucacuu

SEQ ID NO: 45481 - RNA, 21 nt, RNAi
uugucucgacucagguaagug

SEQ ID NO: 45482 - DNA, 21 bp, Homo sapiens
tagataagaaagccatgtaca

SEQ ID NO: 45483 - RNA, 21 nt, RNAi
gauaagaaagccauguacauu

SEQ ID NO: 45484 - RNA, 21 nt, RNAi
uucuauucuuucgguacaugu

SEQ ID NO: 45485 - DNA, 21 bp, Homo sapiens
taagaaagccatgtacaaagc

SEQ ID NO: 45486 - RNA, 21 nt, RNAi
agaaagccauguacaaagcuu

SEQ ID NO: 45487 - RNA, 21 nt, RNAi
uuucuuucgguacauguuucg

SEQ ID NO: 45488 - DNA, 21 bp, Homo sapiens
tacaaagcaggaatggtacag

SEQ ID NO: 45489 - RNA, 21 nt, RNAi
caaagcaggaaugguacaguu

SEQ ID NO: 45490 - RNA, 21 nt, RNAi
uuguuucguccuuaccauguc

SEQ ID NO: 45491 - DNA, 21 bp, Homo sapiens
tacattgccaattgaaacatc

SEQ ID NO: 45492 - RNA, 21 nt, RNAi
cauugccaauugaaacaucuu

SEQ ID NO: 45493 - RNA, 21 nt, RNAi
uuguaacgguuaacuuuguag

SEQ ID NO: 45494 - DNA, 21 bp, Homo sapiens
tagcaattatgtgtatctggt

SEQ ID NO: 45495 - RNA, 21 nt, RNAi
gcaauuauguguaucugguuu

SEQ ID NO: 45496 - RNA, 21 nt, RNAi
uucguuaauacacauagacca

SEQ ID NO: 45497 - DNA, 21 bp, Homo sapiens
tatctggtattagaaatgtgc

SEQ ID NO: 45498 - RNA, 21 nt, RNAi
ucugguauuagaaaugugcuu

SEQ ID NO: 45499 - RNA, 21 nt, RNAi
uuagaccauaaucuuuacacg

SEQ ID NO: 45500 - DNA, 21 bp, Homo sapiens
tagaaatgtgccataatggag

SEQ ID NO: 45501 - RNA, 21 nt, RNAi
gaaaugugccauaauggaguu

SEQ ID NO: 45502 - RNA, 21 nt, RNAi
uucuuuacacgguauuaccuc

SEQ ID NO: 45503 - DNA, 21 bp, Homo sapiens
taatggagaaatgaacaggta

SEQ ID NO: 45504 - RNA, 21 nt, RNAi
auggagaaaugaacagguauu

SEQ ID NO: 45505 - RNA, 21 nt, RNAi
uuuaccucuuuacuuguccau

SEQ ID NO: 45506 - DNA, 21 bp, Homo sapiens
taacctcctactgactcgtaa

SEQ ID NO: 45507 - RNA, 21 nt, RNAi
accuccuacugacucguaauu

SEQ ID NO: 45508 - RNA, 21 nt, RNAi
uuuggaggaugacugagcauu

SEQ ID NO: 45509 - DNA, 21 bp, Homo sapiens
tactgactcgtaatatgaaca

SEQ ID NO: 45510 - RNA, 21 nt, RNAi
cugacucguaauaugaacauu

SEQ ID NO: 45511 - RNA, 21 nt, RNAi
uugacugagcauuauacuugu

SEQ ID NO: 45512 - DNA, 21 bp, Homo sapiens
tatgaacatcaagattgctga

SEQ ID NO: 45513 - RNA, 21 nt, RNAi
ugaacaucaagauugcugauu

SEQ ID NO: 45514 - RNA, 21 nt, RNAi
uuacuuguaguucuaacgacu

SEQ ID NO: 45515 - DNA, 21 bp, Homo sapiens
tatacattatgtggaactcct

SEQ ID NO: 45516 - RNA, 21 nt, RNAi
uacauuauguggaacuccuuu

SEQ ID NO: 45517 - RNA, 21 nt, RNAi
uuauguaauacaccuugagga

SEQ ID NO: 45518 - DNA, 21 bp, Homo sapiens
tacattatgtggaactcctaa

SEQ ID NO: 45519 - RNA, 21 nt, RNAi
cauuauguggaacuccuaauu

SEQ ID NO: 45520 - RNA, 21 nt, RNAi
uuguaauacaccuugaggauu

SEQ ID NO: 45521 - DNA, 21 bp, Homo sapiens
tatgtggaactcctaactaca

SEQ ID NO: 45522 - RNA, 21 nt, RNAi
uguggaacuccuaacuacauu

SEQ ID NO: 45523 - RNA, 21 nt, RNAi
uuacaccuugaggauugaugu

SEQ ID NO: 45524 - DNA, 21 bp, Homo sapiens
tacatttcaccagaaattgcc

SEQ ID NO: 45525 - RNA, 21 nt, RNAi
cauuucaccagaaauugccuu

SEQ ID NO: 45526 - RNA, 21 nt, RNAi
uuguaaaguggucuuuaacgg

SEQ ID NO: 45527 - DNA, 21 bp, Homo sapiens
tattggcagattatgaaatgc

SEQ ID NO: 45528 - RNA, 21 nt, RNAi
uuggcagauuaugaaaugcuu

SEQ ID NO: 45529 - RNA, 21 nt, RNAi
uuaaccgucuaauacuuuacg

SEQ ID NO: 45530 - DNA, 21 bp, Homo sapiens
tagaggccaaggaccttattc

SEQ ID NO: 45531 - RNA, 21 nt, RNAi
gaggccaaggaccuuauucuu

SEQ ID NO: 45532 - RNA, 21 nt, RNAi
uucuccgguuccuggaauaag

SEQ ID NO: 45533 - DNA, 21 bp, Homo sapiens
tattcaccagttacttcgtag

SEQ ID NO: 45534 - RNA, 21 nt, RNAi
uucaccaguuacuucguaguu

SEQ ID NO: 45535 - RNA, 21 nt, RNAi
uuaaguggucaaugaagcauc

SEQ ID NO: 45536 - DNA, 21 bp, Homo sapiens
tacttcgtagaaatccagcag

SEQ ID NO: 45537 - RNA, 21 nt, RNAi
cuucguagaaauccagcaguu

SEQ ID NO: 45538 - RNA, 21 nt, RNAi
uugaagcaucuuuaggucguc

SEQ ID NO: 45539 - DNA, 21 bp, Homo sapiens
tagaaatccagcagatcgttt

SEQ ID NO: 45540 - RNA, 21 nt, RNAi
gaaauccagcagaucguuuuu

SEQ ID NO: 45541 - RNA, 21 nt, RNAi
uucuuuaggucgucuagcaaa

SEQ ID NO: 45542 - DNA, 21 bp, Homo sapiens
taagtctgtcttcagtattgg

SEQ ID NO: 45543 - RNA, 21 nt, RNAi
agucugucuucaguauugguu

SEQ ID NO: 45544 - RNA, 21 nt, RNAi
uuucagacagaagucauaacc

SEQ ID NO: 45545 - DNA, 21 bp, Homo sapiens
taaagatttaggaactgtgga

SEQ ID NO: 45546 - RNA, 21 nt, RNAi
aagauuuaggaacuguggauu

SEQ ID NO: 45547 - RNA, 21 nt, RNAi
uuuucuaaauccuugacaccu

SEQ ID NO: 45548 - DNA, 21 bp, Homo sapiens
taggaactgtggaagactcaa

SEQ ID NO: 45549 - RNA, 21 nt, RNAi
ggaacuguggaagacucaauu

SEQ ID NO: 45550 - RNA, 21 nt, RNAi
uuccuugacaccuucugaguu

SEQ ID NO: 45551 - DNA, 21 bp, Homo sapiens
tactgcaattacagcttcttc

SEQ ID NO: 45552 - RNA, 21 nt, RNAi
cugcaauuacagcuucuucuu

SEQ ID NO: 45553 - RNA, 21 nt, RNAi
uugacguuaaugucgaagaag

SEQ ID NO: 45554 - DNA, 21 bp, Homo sapiens
tacagcttcttccagtaccag

SEQ ID NO: 45555 - RNA, 21 nt, RNAi
cagcuucuuccaguaccaguu

SEQ ID NO: 45556 - RNA, 21 nt, RNAi
uugucgaagaaggucaugguc

SEQ ID NO: 45557 - DNA, 21 bp, Homo sapiens
taccagtataagtggtagttt

SEQ ID NO: 45558 - RNA, 21 nt, RNAi
ccaguauaagugguaguuuuu

SEQ ID NO: 45559 - RNA, 21 nt, RNAi
uuggucauauucaccaucaaa

SEQ ID NO: 45560 - DNA, 21 bp, Homo sapiens
taccttcgtagagcttattcc

SEQ ID NO: 45561 - RNA, 21 nt, RNAi
ccuucguagagcuuauuccuu

SEQ ID NO: 45562 - RNA, 21 nt, RNAi
uuggaagcaucucgaauaagg

SEQ ID NO: 45563 - DNA, 21 bp, Homo sapiens
tagagcttattcctctgatag

SEQ ID NO: 45564 - RNA, 21 nt, RNAi
gagcuuauuccucugauaguu

SEQ ID NO: 45565 - RNA, 21 nt, RNAi
uucucgaauaaggagacuauc

SEQ ID NO: 45566 - DNA, 21 bp, Homo sapiens
tattcctctgatagatctggc

SEQ ID NO: 45567 - RNA, 21 nt, RNAi
uuccucugauagaucuggcuu

SEQ ID NO: 45568 - RNA, 21 nt, RNAi
uuaaggagacuaucuagaccg

SEQ ID NO: 45569 - DNA, 21 bp, Homo sapiens
tagatctggcacttctaatag

SEQ ID NO: 45570 - RNA, 21 nt, RNAi
gaucuggcacuucuaauaguu

SEQ ID NO: 45571 - RNA, 21 nt, RNAi
uucuagaccgugaagauuauc

SEQ ID NO: 45572 - DNA, 21 bp, Homo sapiens
taatagacagtctcaagcaaa

SEQ ID NO: 45573 - RNA, 21 nt, RNAi
auagacagucucaagcaaauu

SEQ ID NO: 45574 - RNA, 21 nt, RNAi
uuuaucugucagaguucguuu

SEQ ID NO: 45575 - DNA, 21 bp, Homo sapiens
tatacaatggaacgatgtcac

SEQ ID NO: 45576 - RNA, 21 nt, RNAi
uacaauggaacgaugucacuu

SEQ ID NO: 45577 - RNA, 21 nt, RNAi
uuauguuaccuugcuacagug

SEQ ID NO: 45578 - DNA, 21 bp, Homo sapiens
tacaatggaacgatgtcactc

SEQ ID NO: 45579 - RNA, 21 nt, RNAi
caauggaacgaugucacucuu

SEQ ID NO: 45580 - RNA, 21 nt, RNAi
uuguuaccuugcuacagugag

SEQ ID NO: 45581 - DNA, 21 bp, Homo sapiens
taacaatcaagcactctccaa

SEQ ID NO: 45582 - RNA, 21 nt, RNAi
acaaucaagcacucuccaauu

SEQ ID NO: 45583 - RNA, 21 nt, RNAi
uuuguuaguucgugagagguu

SEQ ID NO: 45584 - DNA, 21 bp, Homo sapiens
tactgaatatgacagcatcag

SEQ ID NO: 45585 - RNA, 21 nt, RNAi
cugaauaugacagcaucaguu

SEQ ID NO: 45586 - RNA, 21 nt, RNAi
uugacuuauacugucguaguc

SEQ ID NO: 45587 - DNA, 21 bp, Homo sapiens
taccatgaaatatatgactgc

SEQ ID NO: 45588 - RNA, 21 nt, RNAi
ccaugaaauauaugacugcuu

SEQ ID NO: 45589 - RNA, 21 nt, RNAi
uugguacuuuauauacugacg

SEQ ID NO: 45590 - DNA, 21 bp, Homo sapiens
tatatgactgcacttcacagt

SEQ ID NO: 45591 - RNA, 21 nt, RNAi
uaugacugcacuucacaguuu

SEQ ID NO: 45592 - RNA, 21 nt, RNAi
uuauacugacgugaaguguca

SEQ ID NO: 45593 - DNA, 21 bp, Homo sapiens
tatgactgcacttcacagtaa

SEQ ID NO: 45594 - RNA, 21 nt, RNAi
ugacugcacuucacaguaauu

SEQ ID NO: 45595 - RNA, 21 nt, RNAi
uuacugacgugaagugucauu

SEQ ID NO: 45596 - DNA, 21 bp, Homo sapiens
taaacctgagataatccaaca

SEQ ID NO: 45597 - RNA, 21 nt, RNAi
aaccugagauaauccaacauu

SEQ ID NO: 45598 - RNA, 21 nt, RNAi
uuuuggacucuauuagguugu

SEQ ID NO: 45599 - DNA, 21 bp, Homo sapiens
taagaagcattacatctccgt

SEQ ID NO: 45600 - RNA, 21 nt, RNAi
agaagcauuacaucuccguuu

SEQ ID NO: 45601 - RNA, 21 nt, RNAi
uuucuucguaauguagaggca

SEQ ID NO: 45602 - DNA, 21 bp, Homo sapiens
tacatctccgttggttgctca

SEQ ID NO: 45603 - RNA, 21 nt, RNAi
caucuccguugguugcucauu

SEQ ID NO: 45604 - RNA, 21 nt, RNAi
uuguagaggcaaccaacgagu

SEQ ID NO: 45605 - DNA, 21 bp, Homo sapiens
tacttgattcagaggaggtgt

SEQ ID NO: 45606 - RNA, 21 nt, RNAi
cuugauucagaggagguguuu

SEQ ID NO: 45607 - RNA, 21 nt, RNAi
uugaacuaagucuccuccaca

SEQ ID NO: 45608 - DNA, 21 bp, Homo sapiens
taaaggagtatgcatctcaag

SEQ ID NO: 45609 - RNA, 21 nt, RNAi
aaggaguaugcaucucaaguu

SEQ ID NO: 45610 - RNA, 21 nt, RNAi
uuuuccucauacguagaguuc

SEQ ID NO: 45611 - DNA, 21 bp, Homo sapiens
tatgcatctcaagaatatgtg

SEQ ID NO: 45612 - RNA, 21 nt, RNAi
ugcaucucaagaauauguguu

SEQ ID NO: 45613 - RNA, 21 nt, RNAi
uuacguagaguucuuauacac

SEQ ID NO: 45614 - DNA, 21 bp, Homo sapiens
tatgtgaaagaagttcttcag

SEQ ID NO: 45615 - RNA, 21 nt, RNAi
ugugaaagaaguucuucaguu

SEQ ID NO: 45616 - RNA, 21 nt, RNAi
uuacacuuucuucaagaaguc

SEQ ID NO: 45617 - DNA, 21 bp, Homo sapiens
tatctagtgatggaaatacga

SEQ ID NO: 45618 - RNA, 21 nt, RNAi
ucuagugauggaaauacgauu

SEQ ID NO: 45619 - RNA, 21 nt, RNAi
uuagaucacuaccuuuaugcu

SEQ ID NO: 45620 - DNA, 21 bp, Homo sapiens
tagtgatggaaatacgatcac

SEQ ID NO: 45621 - RNA, 21 nt, RNAi
gugauggaaauacgaucacuu

SEQ ID NO: 45622 - RNA, 21 nt, RNAi
uucacuaccuuuaugcuagug

SEQ ID NO: 45623 - DNA, 21 bp, Homo sapiens
tattatccaaatggtggtaga

SEQ ID NO: 45624 - RNA, 21 nt, RNAi
uuauccaaauggugguagauu

SEQ ID NO: 45625 - RNA, 21 nt, RNAi
uuaauagguuuaccaccaucu

SEQ ID NO: 45626 - DNA, 21 bp, Homo sapiens
tatccaaatggtggtagaggt

SEQ ID NO: 45627 - RNA, 21 nt, RNAi
uccaaauggugguagagguuu

SEQ ID NO: 45628 - RNA, 21 nt, RNAi
uuagguuuaccaccaucucca

SEQ ID NO: 45629 - DNA, 21 bp, Homo sapiens
tactgacaacatcagtaggta

SEQ ID NO: 45630 - RNA, 21 nt, RNAi
cugacaacaucaguagguauu

SEQ ID NO: 45631 - RNA, 21 nt, RNAi
uugacuguuguagucauccau

SEQ ID NO: 45632 - DNA, 21 bp, Homo sapiens
taggtacagctttgacaattt

SEQ ID NO: 45633 - RNA, 21 nt, RNAi
gguacagcuuugacaauuuuu

SEQ ID NO: 45634 - RNA, 21 nt, RNAi
uuccaugucgaaacuguuaaa

SEQ ID NO: 45635 - DNA, 21 bp, Homo sapiens
tacagctttgacaatttacca

SEQ ID NO: 45636 - RNA, 21 nt, RNAi
cagcuuugacaauuuaccauu

SEQ ID NO: 45637 - RNA, 21 nt, RNAi
uugucgaaacuguuaaauggu

SEQ ID NO: 45638 - DNA, 21 bp, Homo sapiens
tatcaatatgcttccaggttt

SEQ ID NO: 45639 - RNA, 21 nt, RNAi
ucaauaugcuuccagguuuuu

SEQ ID NO: 45640 - RNA, 21 nt, RNAi
uuaguuauacgaagguccaaa

SEQ ID NO: 45641 - DNA, 21 bp, Homo sapiens
tatgcttccaggtttgtacag

SEQ ID NO: 45642 - RNA, 21 nt, RNAi
ugcuuccagguuuguacaguu

SEQ ID NO: 45643 - RNA, 21 nt, RNAi
uuacgaagguccaaacauguc

SEQ ID NO: 45644 - DNA, 21 bp, Homo sapiens
taatagcttgaaagaggagat

SEQ ID NO: 45645 - RNA, 21 nt, RNAi
auagcuugaaagaggagauuu

SEQ ID NO: 45646 - RNA, 21 nt, RNAi
uuuaucgaacuuucuccucua

SEQ ID NO: 45647 - DNA, 21 bp, Homo sapiens
tagcttgaaagaggagataaa

SEQ ID NO: 45648 - RNA, 21 nt, RNAi
gcuugaaagaggagauaaauu

SEQ ID NO: 45649 - RNA, 21 nt, RNAi
uucgaacuuucuccucuauuu

SEQ ID NO: 45650 - DNA, 21 bp, Homo sapiens
tatatggaccatgctaatgag

SEQ ID NO: 45651 - RNA, 21 nt, RNAi
uauggaccaugcuaaugaguu

SEQ ID NO: 45652 - RNA, 21 nt, RNAi
uuauaccugguacgauuacuc

SEQ ID NO: 45653 - DNA, 21 bp, Homo sapiens
tatttgtttagcactggaatc

SEQ ID NO: 45654 - RNA, 21 nt, RNAi
uuuguuuagcacuggaaucuu

SEQ ID NO: 45655 - RNA, 21 nt, RNAi
uuaaacaaaucgugaccuuag

SEQ ID NO: 45656 - DNA, 21 bp, Homo sapiens
tagcactggaatccataattt

SEQ ID NO: 45657 - RNA, 21 nt, RNAi
gcacuggaauccauaauuuuu

SEQ ID NO: 45658 - RNA, 21 nt, RNAi
uucgugaccuuagguauuaaa

SEQ ID NO: 45659 - DNA, 21 bp, Homo sapiens
taatttcagaagaggaaagga

SEQ ID NO: 45660 - RNA, 21 nt, RNAi
auuucagaagaggaaaggauu

SEQ ID NO: 45661 - RNA, 21 nt, RNAi
uuuaaagucuucuccuuuccu

SEQ ID NO: 45662 - DNA, 21 bp, Homo sapiens
tagtactagttcacctaaggc

SEQ ID NO: 45663 - RNA, 21 nt, RNAi
guacuaguucaccuaaggcuu

SEQ ID NO: 45664 - RNA, 21 nt, RNAi
uucaugaucaaguggauuccg

SEQ ID NO: 45665 - DNA, 21 bp, Homo sapiens
tactagttcacctaaggcctt

SEQ ID NO: 45666 - RNA, 21 nt, RNAi
cuaguucaccuaaggccuuuu

SEQ ID NO: 45667 - RNA, 21 nt, RNAi
uugaucaaguggauuccggaa

SEQ ID NO: 45668 - DNA, 21 bp, Homo sapiens
tagttcacctaaggccttatc

SEQ ID NO: 45669 - RNA, 21 nt, RNAi
guucaccuaaggccuuaucuu

SEQ ID NO: 45670 - RNA, 21 nt, RNAi
uucaaguggauuccggaauag

SEQ ID NO: 45671 - DNA, 21 bp, Homo sapiens
taaggccttatcacctcctcc

SEQ ID NO: 45672 - RNA, 21 nt, RNAi
aggccuuaucaccuccuccuu

SEQ ID NO: 45673 - RNA, 21 nt, RNAi
uuuccggaauaguggaggagg

SEQ ID NO: 45674 - DNA, 21 bp, Homo sapiens
tatcacctcctccttctgtgg

SEQ ID NO: 45675 - RNA, 21 nt, RNAi
ucaccuccuccuucugugguu

SEQ ID NO: 45676 - RNA, 21 nt, RNAi
uuaguggaggaggaagacacc

SEQ ID NO: 45677 - DNA, 21 bp, Homo sapiens
tagagcatctttcaacagaat

SEQ ID NO: 45678 - RNA, 21 nt, RNAi
gagcaucuuucaacagaauuu

SEQ ID NO: 45679 - RNA, 21 nt, RNAi
uucucguagaaaguugucuua

SEQ ID NO: 45680 - DNA, 21 bp, Homo sapiens
tagtgatgcttctccaacaca

SEQ ID NO: 45681 - RNA, 21 nt, RNAi
gugaugcuucuccaacacauu

SEQ ID NO: 45682 - RNA, 21 nt, RNAi
uucacuacgaagagguugugu

SEQ ID NO: 45683 - DNA, 21 bp, Homo sapiens
tatggttacaaatgaaggact

SEQ ID NO: 45684 - RNA, 21 nt, RNAi
ugguuacaaaugaaggacuuu

SEQ ID NO: 45685 - RNA, 21 nt, RNAi
uuaccaauguuuacuuccuga

SEQ ID NO: 45686 - DNA, 21 bp, Homo sapiens
tacaaatgaaggacttggtct

SEQ ID NO: 45687 - RNA, 21 nt, RNAi
caaaugaaggacuuggucuuu

SEQ ID NO: 45688 - RNA, 21 nt, RNAi
uuguuuacuuccugaaccaga

SEQ ID NO: 45689 - DNA, 21 bp, Homo sapiens
tacaactacagcttctggaac

SEQ ID NO: 45690 - RNA, 21 nt, RNAi
caacuacagcuucuggaacuu

SEQ ID NO: 45691 - RNA, 21 nt, RNAi
uuguugaugucgaagaccuug

SEQ ID NO: 45692 - DNA, 21 bp, Homo sapiens
tacagcttctggaacagacat

SEQ ID NO: 45693 - RNA, 21 nt, RNAi
cagcuucuggaacagacauuu

SEQ ID NO: 45694 - RNA, 21 nt, RNAi
uugucgaagaccuugucugua

SEQ ID NO: 45695 - DNA, 21 bp, Homo sapiens
tacacagttaactagtggagc

SEQ ID NO: 45696 - RNA, 21 nt, RNAi
cacaguuaacuaguggagcuu

SEQ ID NO: 45697 - RNA, 21 nt, RNAi
uugugucaauugaucaccucg

SEQ ID NO: 45698 - DNA, 21 bp, Homo sapiens
tatcagttatacctcaccaaa

SEQ ID NO: 45699 - RNA, 21 nt, RNAi
ucaguuauaccucaccaaauu

SEQ ID NO: 45700 - RNA, 21 nt, RNAi
uuagucaauauggagugguuu

SEQ ID NO: 45701 - DNA, 21 bp, Homo sapiens
tatacctcaccaaatggtcaa

SEQ ID NO: 45702 - RNA, 21 nt, RNAi
uaccucaccaaauggucaauu

SEQ ID NO: 45703 - RNA, 21 nt, RNAi
uuauggagugguuuaccaguu

SEQ ID NO: 45704 - DNA, 21 bp, Homo sapiens
tacctcaccaaatggtcaaac

SEQ ID NO: 45705 - RNA, 21 nt, RNAi
ccucaccaaauggucaaacuu

SEQ ID NO: 45706 - RNA, 21 nt, RNAi
uuggagugguuuaccaguuug

SEQ ID NO: 45707 - DNA, 21 bp, Homo sapiens
taccagactacatcaaacaga

SEQ ID NO: 45708 - RNA, 21 nt, RNAi
ccagacuacaucaaacagauu

SEQ ID NO: 45709 - RNA, 21 nt, RNAi
uuggucugauguaguuugucu

SEQ ID NO: 45710 - DNA, 21 bp, Homo sapiens
tacagtgtctgtcttccatcc

SEQ ID NO: 45711 - RNA, 21 nt, RNAi
cagugucugucuuccauccuu

SEQ ID NO: 45712 - RNA, 21 nt, RNAi
uugucacagacagaagguagg

SEQ ID NO: 45713 - DNA, 21 bp, Homo sapiens
taaagtcttcagaaagccttt

SEQ ID NO: 45714 - RNA, 21 nt, RNAi
aagucuucagaaagccuuuuu

SEQ ID NO: 45715 - RNA, 21 nt, RNAi
uuuucagaagucuuucggaaa

SEQ ID NO: 45716 - DNA, 21 bp, Homo sapiens
tatctgagataacaaagcaga

SEQ ID NO: 45717 - RNA, 21 nt, RNAi
ucugagauaacaaagcagauu

SEQ ID NO: 45718 - RNA, 21 nt, RNAi
uuagacucuauuguuucgucu

SEQ ID NO: 45719 - DNA, 21 bp, Homo sapiens
tagaacacctgactttgctct

SEQ ID NO: 45720 - RNA, 21 nt, RNAi
gaacaccugacuuugcucuuu

SEQ ID NO: 45721 - RNA, 21 nt, RNAi
uucuuguggacugaaacgaga

SEQ ID NO: 45722 - DNA, 21 bp, Homo sapiens
aacctcctactgactcgtaat

SEQ ID NO: 45723 - RNA, 21 nt, RNAi
ccuccuacugacucguaauuu

SEQ ID NO: 45724 - RNA, 21 nt, RNAi
uuggaggaugacugagcauua

SEQ ID NO: 45725 - DNA, 21 bp, Homo sapiens
aaattgccactcgaagtgcac

SEQ ID NO: 45726 - RNA, 21 nt, RNAi
auugccacucgaagugcacuu

SEQ ID NO: 45727 - RNA, 21 nt, RNAi
uuuaacggugagcuucacgug

SEQ ID NO: 45728 - DNA, 21 bp, Homo sapiens
aattgccactcgaagtgcaca

SEQ ID NO: 45729 - RNA, 21 nt, RNAi
uugccacucgaagugcacauu

SEQ ID NO: 45730 - RNA, 21 nt, RNAi
uuaacggugagcuucacgugu

SEQ ID NO: 45731 - DNA, 21 bp, Homo sapiens
aatggaacgatgtcactcagc

SEQ ID NO: 45732 - RNA, 21 nt, RNAi
uggaacgaugucacucagcuu

SEQ ID NO: 45733 - RNA, 21 nt, RNAi
uuaccuugcuacagugagucg

SEQ ID NO: 45734 - DNA, 21 bp, Homo sapiens
aaagacctgataacaatcaag

SEQ ID NO: 45735 - RNA, 21 nt, RNAi
agaccugauaacaaucaaguu

SEQ ID NO: 45736 - RNA, 21 nt, RNAi
uuucuggacuauuguuaguuc

SEQ ID NO: 45737 - DNA, 21 bp, Homo sapiens
aagacctgataacaatcaagc

SEQ ID NO: 45738 - RNA, 21 nt, RNAi
gaccugauaacaaucaagcuu

SEQ ID NO: 45739 - RNA, 21 nt, RNAi
uucuggacuauuguuaguucg

SEQ ID NO: 45740 - DNA, 21 bp, Homo sapiens
aatcaagcactctccaatcat

SEQ ID NO: 45741 - RNA, 21 nt, RNAi
ucaagcacucuccaaucauuu

SEQ ID NO: 45742 - RNA, 21 nt, RNAi
uuaguucgugagagguuagua

SEQ ID NO: 45743 - DNA, 21 bp, Homo sapiens
aactactgaatatgacagcat

SEQ ID NO: 45744 - RNA, 21 nt, RNAi
cuacugaauaugacagcauuu

SEQ ID NO: 45745 - RNA, 21 nt, RNAi
uugaugacuuauacugucgua

SEQ ID NO: 45746 - DNA, 21 bp, Homo sapiens
aagaagcattacatctccgtt

SEQ ID NO: 45747 - RNA, 21 nt, RNAi
gaagcauuacaucuccguuuu

SEQ ID NO: 45748 - RNA, 21 nt, RNAi
uucuucguaauguagaggcaa

SEQ ID NO: 45749 - DNA, 21 bp, Homo sapiens
aagcattacatctccgttggt

SEQ ID NO: 45750 - RNA, 21 nt, RNAi
gcauuacaucuccguugguuu

SEQ ID NO: 45751 - RNA, 21 nt, RNAi
uucguaauguagaggcaacca

SEQ ID NO: 45752 - DNA, 21 bp, Homo sapiens
aaatatcaatatgcttccagg

SEQ ID NO: 45753 - RNA, 21 nt, RNAi
auaucaauaugcuuccagguu

SEQ ID NO: 45754 - RNA, 21 nt, RNAi
uuuauaguuauacgaaggucc

SEQ ID NO: 45755 - DNA, 21 bp, Homo sapiens
aatatcaatatgcttccaggt

SEQ ID NO: 45756 - RNA, 21 nt, RNAi
uaucaauaugcuuccagguuu

SEQ ID NO: 45757 - RNA, 21 nt, RNAi
uuauaguuauacgaaggucca

SEQ ID NO: 45758 - DNA, 21 bp, Homo sapiens
aatatgcttccaggtttgtac

SEQ ID NO: 45759 - RNA, 21 nt, RNAi
uaugcuuccagguuuguacuu

SEQ ID NO: 45760 - RNA, 21 nt, RNAi
uuauacgaagguccaaacaug

SEQ ID NO: 45761 - DNA, 21 bp, Homo sapiens
aacagaatggtcatgcatagt

SEQ ID NO: 45762 - RNA, 21 nt, RNAi
cagaauggucaugcauaguuu

SEQ ID NO: 45763 - RNA, 21 nt, RNAi
uugucuuaccaguacguauca

SEQ ID NO: 45764 - DNA, 21 bp, Homo sapiens
aatggtcatgcatagtgatgc

SEQ ID NO: 45765 - RNA, 21 nt, RNAi
uggucaugcauagugaugcuu

SEQ ID NO: 45766 - RNA, 21 nt, RNAi
uuaccaguacguaucacuacg

SEQ ID NO: 45767 - DNA, 21 bp, Homo sapiens
aatgaaggacttggtcttaca

SEQ ID NO: 45768 - RNA, 21 nt, RNAi
ugaaggacuuggucuuacauu

SEQ ID NO: 45769 - RNA, 21 nt, RNAi
uuacuuccugaaccagaaugu

SEQ ID NO: 45770 - DNA, 21 bp, Homo sapiens
aaatggtcaaacaactaggta

SEQ ID NO: 45771 - RNA, 21 nt, RNAi
auggucaaacaacuagguauu

SEQ ID NO: 45772 - RNA, 21 nt, RNAi
uuuaccaguuuguugauccau

SEQ ID NO: 45773 - DNA, 21 bp, Homo sapiens
aatggtcaaacaactaggtat

SEQ ID NO: 45774 - RNA, 21 nt, RNAi
uggucaaacaacuagguauuu

SEQ ID NO: 45775 - RNA, 21 nt, RNAi
uuaccaguuuguugauccaua

SEQ ID NO: 45776 - DNA, 21 bp, Homo sapiens
cacttcatgcaccagatcatc

SEQ ID NO: 45777 - RNA, 21 nt, RNAi
cuucaugcaccagaucaucuu

SEQ ID NO: 45778 - RNA, 21 nt, RNAi
uugaaguacguggucuaguag

SEQ ID NO: 45779 - DNA, 21 bp, Homo sapiens
cattctcatggtatactacac

SEQ ID NO: 45780 - RNA, 21 nt, RNAi
uucucaugguauacuacacuu

SEQ ID NO: 45781 - RNA, 21 nt, RNAi
uuaagaguaccauaugaugug

SEQ ID NO: 45782 - DNA, 21 bp, Homo sapiens
cagaaattgccactcgaagtg

SEQ ID NO: 45783 - RNA, 21 nt, RNAi
gaaauugccacucgaaguguu

SEQ ID NO: 45784 - RNA, 21 nt, RNAi
uucuuuaacggugagcuucac

SEQ ID NO: 45785 - DNA, 21 bp, Homo sapiens
cagttacttcgtagaaatcca

SEQ ID NO: 45786 - RNA, 21 nt, RNAi
guuacuucguagaaauccauu

SEQ ID NO: 45787 - RNA, 21 nt, RNAi
uucaaugaagcaucuuuaggu

SEQ ID NO: 45788 - DNA, 21 bp, Homo sapiens
cagcagatcgtttaagtctgt

SEQ ID NO: 45789 - RNA, 21 nt, RNAi
gcagaucguuuaagucuguuu

SEQ ID NO: 45790 - RNA, 21 nt, RNAi
uucgucuagcaaauucagaca

SEQ ID NO: 45791 - DNA, 21 bp, Homo sapiens
cagatcgtttaagtctgtctt

SEQ ID NO: 45792 - RNA, 21 nt, RNAi
gaucguuuaagucugucuuuu

SEQ ID NO: 45793 - RNA, 21 nt, RNAi
uucuagcaaauucagacagaa

SEQ ID NO: 45794 - DNA, 21 bp, Homo sapiens
cattctcgataccttcgtaga

SEQ ID NO: 45795 - RNA, 21 nt, RNAi
uucucgauaccuucguagauu

SEQ ID NO: 45796 - RNA, 21 nt, RNAi
uuaagagcuauggaagcaucu

SEQ ID NO: 45797 - DNA, 21 bp, Homo sapiens
catatacaatggaacgatgtc

SEQ ID NO: 45798 - RNA, 21 nt, RNAi
uauacaauggaacgaugucuu

SEQ ID NO: 45799 - RNA, 21 nt, RNAi
uuauauguuaccuugcuacag

SEQ ID NO: 45800 - DNA, 21 bp, Homo sapiens
caatggaacgatgtcactcag

SEQ ID NO: 45801 - RNA, 21 nt, RNAi
auggaacgaugucacucaguu

SEQ ID NO: 45802 - RNA, 21 nt, RNAi
uuuaccuugcuacagugaguc

SEQ ID NO: 45803 - DNA, 21 bp, Homo sapiens
caatcaagcactctccaatca

SEQ ID NO: 45804 - RNA, 21 nt, RNAi
aucaagcacucuccaaucauu

SEQ ID NO: 45805 - RNA, 21 nt, RNAi
uuuaguucgugagagguuagu

SEQ ID NO: 45806 - DNA, 21 bp, Homo sapiens
cacctcagactgaaaccgtac

SEQ ID NO: 45807 - RNA, 21 nt, RNAi
ccucagacugaaaccguacuu

SEQ ID NO: 45808 - RNA, 21 nt, RNAi
uuggagucugacuuuggcaug

SEQ ID NO: 45809 - DNA, 21 bp, Homo sapiens
cagactgaaaccgtacaacag

SEQ ID NO: 45810 - RNA, 21 nt, RNAi
gacugaaaccguacaacaguu

SEQ ID NO: 45811 - RNA, 21 nt, RNAi
uucugacuuuggcauguuguc

SEQ ID NO: 45812 - DNA, 21 bp, Homo sapiens
cattacatctccgttggttgc

SEQ ID NO: 45813 - RNA, 21 nt, RNAi
uuacaucuccguugguugcuu

SEQ ID NO: 45814 - RNA, 21 nt, RNAi
uuaauguagaggcaaccaacg

SEQ ID NO: 45815 - DNA, 21 bp, Homo sapiens
catctccgttggttgctcaca

SEQ ID NO: 45816 - RNA, 21 nt, RNAi
ucuccguugguugcucacauu

SEQ ID NO: 45817 - RNA, 21 nt, RNAi
uuagaggcaaccaacgagugu

SEQ ID NO: 45818 - DNA, 21 bp, Homo sapiens
caatatgcttccaggtttgta

SEQ ID NO: 45819 - RNA, 21 nt, RNAi
auaugcuuccagguuuguauu

SEQ ID NO: 45820 - RNA, 21 nt, RNAi
uuuauacgaagguccaaacau

SEQ ID NO: 45821 - DNA, 21 bp, Homo sapiens
caacgagagatagagcatctt

SEQ ID NO: 45822 - RNA, 21 nt, RNAi
acgagagauagagcaucuuuu

SEQ ID NO: 45823 - RNA, 21 nt, RNAi
uuugcucucuaucucguagaa

SEQ ID NO: 45824 - DNA, 21 bp, Homo sapiens
caacagaatggtcatgcatag

SEQ ID NO: 45825 - RNA, 21 nt, RNAi
acagaauggucaugcauaguu

SEQ ID NO: 45826 - RNA, 21 nt, RNAi
uuugucuuaccaguacguauc

SEQ ID NO: 45827 - DNA, 21 bp, Homo sapiens
cagaatggtcatgcatagtga

SEQ ID NO: 45828 - RNA, 21 nt, RNAi
gaauggucaugcauagugauu

SEQ ID NO: 45829 - RNA, 21 nt, RNAi
uucuuaccaguacguaucacu

SEQ ID NO: 45830 - DNA, 21 bp, Homo sapiens
caccaaatggtcaaacaacta

SEQ ID NO: 45831 - RNA, 21 nt, RNAi
ccaaauggucaaacaacuauu

SEQ ID NO: 45832 - RNA, 21 nt, RNAi
uugguuuaccaguuuguugau

SEQ ID NO: 45833 - DNA, 21 bp, Homo sapiens
caaatggtcaaacaactaggt

SEQ ID NO: 45834 - RNA, 21 nt, RNAi
aauggucaaacaacuagguuu

SEQ ID NO: 45835 - RNA, 21 nt, RNAi
uuuuaccaguuuguugaucca

SEQ ID NO: 45836 - DNA, 21 bp, Homo sapiens
gagtccattcacagtggtttg

SEQ ID NO: 45837 - RNA, 21 nt, RNAi
guccauucacagugguuuguu

SEQ ID NO: 45838 - RNA, 21 nt, RNAi
uucagguaagugucaccaaac

SEQ ID NO: 45839 - DNA, 21 bp, Homo sapiens
gaatggtacagagagtccaaa

SEQ ID NO: 45840 - RNA, 21 nt, RNAi
augguacagagaguccaaauu

SEQ ID NO: 45841 - RNA, 21 nt, RNAi
uuuaccaugucucucagguuu

SEQ ID NO: 45842 - DNA, 21 bp, Homo sapiens
gaaatgtgccataatggagaa

SEQ ID NO: 45843 - RNA, 21 nt, RNAi
aaugugccauaauggagaauu

SEQ ID NO: 45844 - RNA, 21 nt, RNAi
uuuuacacgguauuaccucuu

SEQ ID NO: 45845 - DNA, 21 bp, Homo sapiens
gaagctcgacacttcatgcac

SEQ ID NO: 45846 - RNA, 21 nt, RNAi
agcucgacacuucaugcacuu

SEQ ID NO: 45847 - RNA, 21 nt, RNAi
uuucgagcugugaaguacgug

SEQ ID NO: 45848 - DNA, 21 bp, Homo sapiens
gaaattgccactcgaagtgca

SEQ ID NO: 45849 - RNA, 21 nt, RNAi
aauugccacucgaagugcauu

SEQ ID NO: 45850 - RNA, 21 nt, RNAi
uuuuaacggugagcuucacgu

SEQ ID NO: 45851 - DNA, 21 bp, Homo sapiens
gaggccaaggaccttattcac

SEQ ID NO: 45852 - RNA, 21 nt, RNAi
ggccaaggaccuuauucacuu

SEQ ID NO: 45853 - RNA, 21 nt, RNAi
uuccgguuccuggaauaagug

SEQ ID NO: 45854 - DNA, 21 bp, Homo sapiens
gaccttattcaccagttactt

SEQ ID NO: 45855 - RNA, 21 nt, RNAi
ccuuauucaccaguuacuuuu

SEQ ID NO: 45856 - RNA, 21 nt, RNAi
uuggaauaaguggucaaugaa

SEQ ID NO: 45857 - DNA, 21 bp, Homo sapiens
gatcgtttaagtctgtcttca

SEQ ID NO: 45858 - RNA, 21 nt, RNAi
ucguuuaagucugucuucauu

SEQ ID NO: 45859 - RNA, 21 nt, RNAi
uuagcaaauucagacagaagu

SEQ ID NO: 45860 - DNA, 21 bp, Homo sapiens
gaaaccagtaatagtggaagg

SEQ ID NO: 45861 - RNA, 21 nt, RNAi
aaccaguaauaguggaagguu

SEQ ID NO: 45862 - RNA, 21 nt, RNAi
uuuuggucauuaucaccuucc

SEQ ID NO: 45863 - DNA, 21 bp, Homo sapiens
gataccttcgtagagcttatt

SEQ ID NO: 45864 - RNA, 21 nt, RNAi
uaccuucguagagcuuauuuu

SEQ ID NO: 45865 - RNA, 21 nt, RNAi
uuauggaagcaucucgaauaa

SEQ ID NO: 45866 - DNA, 21 bp, Homo sapiens
gaacgatgtcactcagcagaa

SEQ ID NO: 45867 - RNA, 21 nt, RNAi
acgaugucacucagcagaauu

SEQ ID NO: 45868 - RNA, 21 nt, RNAi
uuugcuacagugagucgucuu

SEQ ID NO: 45869 - DNA, 21 bp, Homo sapiens
gacctgataacaatcaagcac

SEQ ID NO: 45870 - RNA, 21 nt, RNAi
ccugauaacaaucaagcacuu

SEQ ID NO: 45871 - RNA, 21 nt, RNAi
uuggacuauuguuaguucgug

SEQ ID NO: 45872 - DNA, 21 bp, Homo sapiens
gacacctcagactgaaaccgt

SEQ ID NO: 45873 - RNA, 21 nt, RNAi
caccucagacugaaaccguuu

SEQ ID NO: 45874 - RNA, 21 nt, RNAi
uuguggagucugacuuuggca

SEQ ID NO: 45875 - DNA, 21 bp, Homo sapiens
gactgaaaccgtacaacagtg

SEQ ID NO: 45876 - RNA, 21 nt, RNAi
cugaaaccguacaacaguguu

SEQ ID NO: 45877 - RNA, 21 nt, RNAi
uugacuuuggcauguugucac

SEQ ID NO: 45878 - DNA, 21 bp, Homo sapiens
gatgcttctgataatgcacat

SEQ ID NO: 45879 - RNA, 21 nt, RNAi
ugcuucugauaaugcacauuu

SEQ ID NO: 45880 - RNA, 21 nt, RNAi
uuacgaagacuauuacgugua

SEQ ID NO: 45881 - DNA, 21 bp, Homo sapiens
gaagcattacatctccgttgg

SEQ ID NO: 45882 - RNA, 21 nt, RNAi
agcauuacaucuccguugguu

SEQ ID NO: 45883 - RNA, 21 nt, RNAi
uuucguaauguagaggcaacc

SEQ ID NO: 45884 - DNA, 21 bp, Homo sapiens
gagcttgtaaaggagtatgca

SEQ ID NO: 45885 - RNA, 21 nt, RNAi
gcuuguaaaggaguaugcauu

SEQ ID NO: 45886 - RNA, 21 nt, RNAi
uucgaacauuuccucauacgu

SEQ ID NO: 45887 - DNA, 21 bp, Homo sapiens
gagcatctttcaacagaatgg

SEQ ID NO: 45888 - RNA, 21 nt, RNAi
gcaucuuucaacagaaugguu

SEQ ID NO: 45889 - RNA, 21 nt, RNAi
uucguagaaaguugucuuacc

SEQ ID NO: 45890 - DNA, 21 bp, Homo sapiens
gaatggtcatgcatagtgatg

SEQ ID NO: 45891 - RNA, 21 nt, RNAi
auggucaugcauagugauguu

SEQ ID NO: 45892 - RNA, 21 nt, RNAi
uuuaccaguacguaucacuac

SEQ ID NO: 45893 - DNA, 21 bp, Homo sapiens
gaaggacttggtcttacaact

SEQ ID NO: 45894 - RNA, 21 nt, RNAi
aggacuuggucuuacaacuuu

SEQ ID NO: 45895 - RNA, 21 nt, RNAi
uuuccugaaccagaauguuga

SEQ ID NO: 45896 - DNA, 21 bp, Homo sapiens
taacctcctactgactcgtaa

SEQ ID NO: 45897 - RNA, 21 nt, RNAi
accuccuacugacucguaauu

SEQ ID NO: 45898 - RNA, 21 nt, RNAi
uuuggaggaugacugagcauu

SEQ ID NO: 45899 - DNA, 21 bp, Homo sapiens
tactgactcgtaatatgaaca

SEQ ID NO: 45900 - RNA, 21 nt, RNAi
cugacucguaauaugaacauu

SEQ ID NO: 45901 - RNA, 21 nt, RNAi
uugacugagcauuauacuugu

SEQ ID NO: 45902 - DNA, 21 bp, Homo sapiens
tatgtggaactcctaactaca

SEQ ID NO: 45903 - RNA, 21 nt, RNAi
uguggaacuccuaacuacauu

SEQ ID NO: 45904 - RNA, 21 nt, RNAi
uuacaccuugaggauugaugu

SEQ ID NO: 45905 - DNA, 21 bp, Homo sapiens
tagaggccaaggaccttattc

SEQ ID NO: 45906 - RNA, 21 nt, RNAi
gaggccaaggaccuuauucuu

SEQ ID NO: 45907 - RNA, 21 nt, RNAi
uucuccgguuccuggaauaag

SEQ ID NO: 45908 - DNA, 21 bp, Homo sapiens
tacttcgtagaaatccagcag

SEQ ID NO: 45909 - RNA, 21 nt, RNAi
cuucguagaaauccagcaguu

SEQ ID NO: 45910 - RNA, 21 nt, RNAi
uugaagcaucuuuaggucguc

SEQ ID NO: 45911 - DNA, 21 bp, Homo sapiens
taccttcgtagagcttattcc

SEQ ID NO: 45912 - RNA, 21 nt, RNAi
ccuucguagagcuuauuccuu

SEQ ID NO: 45913 - RNA, 21 nt, RNAi
uuggaagcaucucgaauaagg

SEQ ID NO: 45914 - DNA, 21 bp, Homo sapiens
tatacaatggaacgatgtcac

SEQ ID NO: 45915 - RNA, 21 nt, RNAi
uacaauggaacgaugucacuu

SEQ ID NO: 45916 - RNA, 21 nt, RNAi
uuauguuaccuugcuacagug

SEQ ID NO: 45917 - DNA, 21 bp, Homo sapiens
tacaatggaacgatgtcactc

SEQ ID NO: 45918 - RNA, 21 nt, RNAi
caauggaacgaugucacucuu

SEQ ID NO: 45919 - RNA, 21 nt, RNAi
uuguuaccuugcuacagugag

SEQ ID NO: 45920 - DNA, 21 bp, Homo sapiens
tactgaatatgacagcatcag

SEQ ID NO: 45921 - RNA, 21 nt, RNAi
cugaauaugacagcaucaguu

SEQ ID NO: 45922 - RNA, 21 nt, RNAi
uugacuuauacugucguaguc

SEQ ID NO: 45923 - DNA, 21 bp, Homo sapiens
taagaagcattacatctccgt

SEQ ID NO: 45924 - RNA, 21 nt, RNAi
agaagcauuacaucuccguuu

SEQ ID NO: 45925 - RNA, 21 nt, RNAi
uuucuucguaauguagaggca

SEQ ID NO: 45926 - DNA, 21 bp, Homo sapiens
tacatctccgttggttgctca

SEQ ID NO: 45927 - RNA, 21 nt, RNAi
caucuccguugguugcucauu

SEQ ID NO: 45928 - RNA, 21 nt, RNAi
uuguagaggcaaccaacgagu

SEQ ID NO: 45929 - DNA, 21 bp, Homo sapiens
tacttgattcagaggaggtgt

SEQ ID NO: 45930 - RNA, 21 nt, RNAi
cuugauucagaggagguguuu

SEQ ID NO: 45931 - RNA, 21 nt, RNAi
uugaacuaagucuccuccaca

SEQ ID NO: 45932 - DNA, 21 bp, Homo sapiens
tatctagtgatggaaatacga

SEQ ID NO: 45933 - RNA, 21 nt, RNAi
ucuagugauggaaauacgauu

SEQ ID NO: 45934 - RNA, 21 nt, RNAi
uuagaucacuaccuuuaugcu

SEQ ID NO: 45935 - DNA, 21 bp, Homo sapiens
tagtgatggaaatacgatcac

SEQ ID NO: 45936 - RNA, 21 nt, RNAi
gugauggaaauacgaucacuu

SEQ ID NO: 45937 - RNA, 21 nt, RNAi
uucacuaccuuuaugcuagug

SEQ ID NO: 45938 - DNA, 21 bp, Homo sapiens
tatcaatatgcttccaggttt

SEQ ID NO: 45939 - RNA, 21 nt, RNAi
ucaauaugcuuccagguuuuu

SEQ ID NO: 45940 - RNA, 21 nt, RNAi
uuaguuauacgaagguccaaa

SEQ ID NO: 45941 - DNA, 21 bp, Homo sapiens
tatacctcaccaaatggtcaa

SEQ ID NO: 45942 - RNA, 21 nt, RNAi
uaccucaccaaauggucaauu

SEQ ID NO: 45943 - RNA, 21 nt, RNAi
uuauggagugguuuaccaguu

SEQ ID NO: 45944 - DNA, 21 bp, Homo sapiens
tacctcaccaaatggtcaaac

SEQ ID NO: 45945 - RNA, 21 nt, RNAi
ccucaccaaauggucaaacuu

SEQ ID NO: 45946 - RNA, 21 nt, RNAi
uuggagugguuuaccaguuug

SEQ ID NO: 45947 - DNA, 21 bp, Homo sapiens
aaaggaagtttcaagtggaag

SEQ ID NO: 45948 - RNA, 21 nt, RNAi
aggaaguuucaaguggaaguu

SEQ ID NO: 45949 - RNA, 21 nt, RNAi
uuuccuucaaaguucaccuuc

SEQ ID NO: 45950 - DNA, 21 bp, Homo sapiens
aaggaagtttcaagtggaagg

SEQ ID NO: 45951 - RNA, 21 nt, RNAi
ggaaguuucaaguggaagguu

SEQ ID NO: 45952 - RNA, 21 nt, RNAi
uuccuucaaaguucaccuucc

SEQ ID NO: 45953 - DNA, 21 bp, Homo sapiens
aagtttcaagtggaaggtcgt

SEQ ID NO: 45954 - RNA, 21 nt, RNAi
guuucaaguggaaggucguuu

SEQ ID NO: 45955 - RNA, 21 nt, RNAi
uucaaaguucaccuuccagca

SEQ ID NO: 45956 - DNA, 21 bp, Homo sapiens
aagtggaaggtcgtccgtcgg

SEQ ID NO: 45957 - RNA, 21 nt, RNAi
guggaaggucguccgucgguu

SEQ ID NO: 45958 - RNA, 21 nt, RNAi
uucaccuuccagcaggcagcc

SEQ ID NO: 45959 - DNA, 21 bp, Homo sapiens
aaatgccagaccagtatggat

SEQ ID NO: 45960 - RNA, 21 nt, RNAi
augccagaccaguauggauuu

SEQ ID NO: 45961 - RNA, 21 nt, RNAi
uuuacggucuggucauaccua

SEQ ID NO: 45962 - DNA, 21 bp, Homo sapiens
aatgccagaccagtatggatg

SEQ ID NO: 45963 - RNA, 21 nt, RNAi
ugccagaccaguauggauguu

SEQ ID NO: 45964 - RNA, 21 nt, RNAi
uuacggucuggucauaccuac

SEQ ID NO: 45965 - DNA, 21 bp, Homo sapiens
aaagaaattcaagccatgagt

SEQ ID NO: 45966 - RNA, 21 nt, RNAi
agaaauucaagccaugaguuu

SEQ ID NO: 45967 - RNA, 21 nt, RNAi
uuucuuuaaguucgguacuca

SEQ ID NO: 45968 - DNA, 21 bp, Homo sapiens
aagaaattcaagccatgagtc

SEQ ID NO: 45969 - RNA, 21 nt, RNAi
gaaauucaagccaugagucuu

SEQ ID NO: 45970 - RNA, 21 nt, RNAi
uucuuuaaguucgguacucag

SEQ ID NO: 45971 - DNA, 21 bp, Homo sapiens
aaattcaagccatgagtcagt

SEQ ID NO: 45972 - RNA, 21 nt, RNAi
auucaagccaugagucaguuu

SEQ ID NO: 45973 - RNA, 21 nt, RNAi
uuuaaguucgguacucaguca

SEQ ID NO: 45974 - DNA, 21 bp, Homo sapiens
aattcaagccatgagtcagtg

SEQ ID NO: 45975 - RNA, 21 nt, RNAi
uucaagccaugagucaguguu

SEQ ID NO: 45976 - RNA, 21 nt, RNAi
uuaaguucgguacucagucac

SEQ ID NO: 45977 - DNA, 21 bp, Homo sapiens
aagccatgagtcagtgcagcc

SEQ ID NO: 45978 - RNA, 21 nt, RNAi
gccaugagucagugcagccuu

SEQ ID NO: 45979 - RNA, 21 nt, RNAi
uucgguacucagucacgucgg

SEQ ID NO: 45980 - DNA, 21 bp, Homo sapiens
aacgtagtgacctattacacc

SEQ ID NO: 45981 - RNA, 21 nt, RNAi
cguagugaccuauuacaccuu

SEQ ID NO: 45982 - RNA, 21 nt, RNAi
uugcaucacuggauaaugugg

SEQ ID NO: 45983 - DNA, 21 bp, Homo sapiens
aaagatgaactttggctggtc

SEQ ID NO: 45984 - RNA, 21 nt, RNAi
agaugaacuuuggcuggucuu

SEQ ID NO: 45985 - RNA, 21 nt, RNAi
uuucuacuugaaaccgaccag

SEQ ID NO: 45986 - DNA, 21 bp, Homo sapiens
aagatgaactttggctggtca

SEQ ID NO: 45987 - RNA, 21 nt, RNAi
gaugaacuuuggcuggucauu

SEQ ID NO: 45988 - RNA, 21 nt, RNAi
uucuacuugaaaccgaccagu

SEQ ID NO: 45989 - DNA, 21 bp, Homo sapiens
aactttggctggtcatgaaat

SEQ ID NO: 45990 - RNA, 21 nt, RNAi
cuuuggcuggucaugaaauuu

SEQ ID NO: 45991 - RNA, 21 nt, RNAi
uugaaaccgaccaguacuuua

SEQ ID NO: 45992 - DNA, 21 bp, Homo sapiens
aaattactaagtggaggttca

SEQ ID NO: 45993 - RNA, 21 nt, RNAi
auuacuaaguggagguucauu

SEQ ID NO: 45994 - RNA, 21 nt, RNAi
uuuaaugauucaccuccaagu

SEQ ID NO: 45995 - DNA, 21 bp, Homo sapiens
aattactaagtggaggttcaa

SEQ ID NO: 45996 - RNA, 21 nt, RNAi
uuacuaaguggagguucaauu

SEQ ID NO: 45997 - RNA, 21 nt, RNAi
uuaaugauucaccuccaaguu

SEQ ID NO: 45998 - DNA, 21 bp, Homo sapiens
aagtggaggttcaatgttgga

SEQ ID NO: 45999 - RNA, 21 nt, RNAi
guggagguucaauguuggauu

SEQ ID NO: 46000 - RNA, 21 nt, RNAi
uucaccuccaaguuacaaccu

SEQ ID NO: 46001 - DNA, 21 bp, Homo sapiens
aaatacattgtcaaccgagga

SEQ ID NO: 46002 - RNA, 21 nt, RNAi
auacauugucaaccgaggauu

SEQ ID NO: 46003 - RNA, 21 nt, RNAi
uuuauguaacaguuggcuccu

SEQ ID NO: 46004 - DNA, 21 bp, Homo sapiens
aatacattgtcaaccgaggag

SEQ ID NO: 46005 - RNA, 21 nt, RNAi
uacauugucaaccgaggaguu

SEQ ID NO: 46006 - RNA, 21 nt, RNAi
uuauguaacaguuggcuccuc

SEQ ID NO: 46007 - DNA, 21 bp, Homo sapiens
aaccgaggagaacacaagaat

SEQ ID NO: 46008 - RNA, 21 nt, RNAi
ccgaggagaacacaagaauuu

SEQ ID NO: 46009 - RNA, 21 nt, RNAi
uuggcuccucuuguguucuua

SEQ ID NO: 46010 - DNA, 21 bp, Homo sapiens
aacacaagaatggagttctgg

SEQ ID NO: 46011 - RNA, 21 nt, RNAi
cacaagaauggaguucugguu

SEQ ID NO: 46012 - RNA, 21 nt, RNAi
uuguguucuuaccucaagacc

SEQ ID NO: 46013 - DNA, 21 bp, Homo sapiens
aagaatggagttctggaagag

SEQ ID NO: 46014 - RNA, 21 nt, RNAi
gaauggaguucuggaagaguu

SEQ ID NO: 46015 - RNA, 21 nt, RNAi
uucuuaccucaagaccuucuc

SEQ ID NO: 46016 - DNA, 21 bp, Homo sapiens
aatggagttctggaagaggca

SEQ ID NO: 46017 - RNA, 21 nt, RNAi
uggaguucuggaagaggcauu

SEQ ID NO: 46018 - RNA, 21 nt, RNAi
uuaccucaagaccuucuccgu

SEQ ID NO: 46019 - DNA, 21 bp, Homo sapiens
aagaggcaataatagcaacaa

SEQ ID NO: 46020 - RNA, 21 nt, RNAi
gaggcaauaauagcaacaauu

SEQ ID NO: 46021 - RNA, 21 nt, RNAi
uucuccguuauuaucguuguu

SEQ ID NO: 46022 - DNA, 21 bp, Homo sapiens
aaggcttagactatctacaca

SEQ ID NO: 46023 - RNA, 21 nt, RNAi
ggcuuagacuaucuacacauu

SEQ ID NO: 46024 - RNA, 21 nt, RNAi
uuccgaaucugauagaugugu

SEQ ID NO: 46025 - DNA, 21 bp, Homo sapiens
aaagctggtaatattcttctg

SEQ ID NO: 46026 - RNA, 21 nt, RNAi
agcugguaauauucuucuguu

SEQ ID NO: 46027 - RNA, 21 nt, RNAi
uuucgaccauuauaagaagac

SEQ ID NO: 46028 - DNA, 21 bp, Homo sapiens
aagctggtaatattcttctgg

SEQ ID NO: 46029 - RNA, 21 nt, RNAi
gcugguaauauucuucugguu

SEQ ID NO: 46030 - RNA, 21 nt, RNAi
uucgaccauuauaagaagacc

SEQ ID NO: 46031 - DNA, 21 bp, Homo sapiens
aagtgcgttcctagcaacagg

SEQ ID NO: 46032 - RNA, 21 nt, RNAi
gugcguuccuagcaacagguu

SEQ ID NO: 46033 - RNA, 21 nt, RNAi
uucacgcaaggaucguugucc

SEQ ID NO: 46034 - DNA, 21 bp, Homo sapiens
aagtcatggaacaggtgagag

SEQ ID NO: 46035 - RNA, 21 nt, RNAi
gucauggaacaggugagaguu

SEQ ID NO: 46036 - RNA, 21 nt, RNAi
uucaguaccuuguccacucuc

SEQ ID NO: 46037 - DNA, 21 bp, Homo sapiens
aacaggtgagaggctatgact

SEQ ID NO: 46038 - RNA, 21 nt, RNAi
caggugagaggcuaugacuuu

SEQ ID NO: 46039 - RNA, 21 nt, RNAi
uuguccacucuccgauacuga

SEQ ID NO: 46040 - DNA, 21 bp, Homo sapiens
aataactgccattgaattagc

SEQ ID NO: 46041 - RNA, 21 nt, RNAi
uaacugccauugaauuagcuu

SEQ ID NO: 46042 - RNA, 21 nt, RNAi
uuauugacgguaacuuaaucg

SEQ ID NO: 46043 - DNA, 21 bp, Homo sapiens
aactgccattgaattagcaac

SEQ ID NO: 46044 - RNA, 21 nt, RNAi
cugccauugaauuagcaacuu

SEQ ID NO: 46045 - RNA, 21 nt, RNAi
uugacgguaacuuaaucguug

SEQ ID NO: 46046 - DNA, 21 bp, Homo sapiens
aattagcaacaggagcagcgc

SEQ ID NO: 46047 - RNA, 21 nt, RNAi
uuagcaacaggagcagcgcuu

SEQ ID NO: 46048 - RNA, 21 nt, RNAi
uuaaucguuguccucgucgcg

SEQ ID NO: 46049 - DNA, 21 bp, Homo sapiens
aacaggagcagcgccttatca

SEQ ID NO: 46050 - RNA, 21 nt, RNAi
caggagcagcgccuuaucauu

SEQ ID NO: 46051 - RNA, 21 nt, RNAi
uuguccucgucgcggaauagu

SEQ ID NO: 46052 - DNA, 21 bp, Homo sapiens
aagtgttaatgttgactttgc

SEQ ID NO: 46053 - RNA, 21 nt, RNAi
guguuaauguugacuuugcuu

SEQ ID NO: 46054 - RNA, 21 nt, RNAi
uucacaauuacaacugaaacg

SEQ ID NO: 46055 - DNA, 21 bp, Homo sapiens
aaagtacggcaagtcctttag

SEQ ID NO: 46056 - RNA, 21 nt, RNAi
aguacggcaaguccuuuaguu

SEQ ID NO: 46057 - RNA, 21 nt, RNAi
uuucaugccguucaggaaauc

SEQ ID NO: 46058 - DNA, 21 bp, Homo sapiens
aagtacggcaagtcctttaga

SEQ ID NO: 46059 - RNA, 21 nt, RNAi
guacggcaaguccuuuagauu

SEQ ID NO: 46060 - RNA, 21 nt, RNAi
uucaugccguucaggaaaucu

SEQ ID NO: 46061 - DNA, 21 bp, Homo sapiens
aattactttcactgtgtcttc

SEQ ID NO: 46062 - RNA, 21 nt, RNAi
uuacuuucacugugucuucuu

SEQ ID NO: 46063 - RNA, 21 nt, RNAi
uuaaugaaagugacacagaag

SEQ ID NO: 46064 - DNA, 21 bp, Homo sapiens
aatgcaaattcttccagaaag

SEQ ID NO: 46065 - RNA, 21 nt, RNAi
ugcaaauucuuccagaaaguu

SEQ ID NO: 46066 - RNA, 21 nt, RNAi
uuacguuuaagaaggucuuuc

SEQ ID NO: 46067 - DNA, 21 bp, Homo sapiens
aaattcttccagaaagccaag

SEQ ID NO: 46068 - RNA, 21 nt, RNAi
auucuuccagaaagccaaguu

SEQ ID NO: 46069 - RNA, 21 nt, RNAi
uuuaagaaggucuuucgguuc

SEQ ID NO: 46070 - DNA, 21 bp, Homo sapiens
aattcttccagaaagccaaga

SEQ ID NO: 46071 - RNA, 21 nt, RNAi
uucuuccagaaagccaagauu

SEQ ID NO: 46072 - RNA, 21 nt, RNAi
uuaagaaggucuuucgguucu

SEQ ID NO: 46073 - DNA, 21 bp, Homo sapiens
aaagccaagaacagagagtac

SEQ ID NO: 46074 - RNA, 21 nt, RNAi
agccaagaacagagaguacuu

SEQ ID NO: 46075 - RNA, 21 nt, RNAi
uuucgguucuugucucucaug

SEQ ID NO: 46076 - DNA, 21 bp, Homo sapiens
aagccaagaacagagagtacc

SEQ ID NO: 46077 - RNA, 21 nt, RNAi
gccaagaacagagaguaccuu

SEQ ID NO: 46078 - RNA, 21 nt, RNAi
uucgguucuugucucucaugg

SEQ ID NO: 46079 - DNA, 21 bp, Homo sapiens
aagaacagagagtacctgatt

SEQ ID NO: 46080 - RNA, 21 nt, RNAi
gaacagagaguaccugauuuu

SEQ ID NO: 46081 - RNA, 21 nt, RNAi
uucuugucucucauggacuaa

SEQ ID NO: 46082 - DNA, 21 bp, Homo sapiens
aacagagagtacctgattgag

SEQ ID NO: 46083 - RNA, 21 nt, RNAi
cagagaguaccugauugaguu

SEQ ID NO: 46084 - RNA, 21 nt, RNAi
uugucucucauggacuaacuc

SEQ ID NO: 46085 - DNA, 21 bp, Homo sapiens
aagctgcttacaagaacacca

SEQ ID NO: 46086 - RNA, 21 nt, RNAi
gcugcuuacaagaacaccauu

SEQ ID NO: 46087 - RNA, 21 nt, RNAi
uucgacgaauguucuuguggu

SEQ ID NO: 46088 - DNA, 21 bp, Homo sapiens
aaaggtaagaagagttcctgg

SEQ ID NO: 46089 - RNA, 21 nt, RNAi
agguaagaagaguuccugguu

SEQ ID NO: 46090 - RNA, 21 nt, RNAi
uuuccauucuucucaaggacc

SEQ ID NO: 46091 - DNA, 21 bp, Homo sapiens
aaatccagagattgcagtgag

SEQ ID NO: 46092 - RNA, 21 nt, RNAi
auccagagauugcagugaguu

SEQ ID NO: 46093 - RNA, 21 nt, RNAi
uuuaggucucuaacgucacuc

SEQ ID NO: 46094 - DNA, 21 bp, Homo sapiens
aatccagagattgcagtgagt

SEQ ID NO: 46095 - RNA, 21 nt, RNAi
uccagagauugcagugaguuu

SEQ ID NO: 46096 - RNA, 21 nt, RNAi
uuaggucucuaacgucacuca

SEQ ID NO: 46097 - DNA, 21 bp, Homo sapiens
aatgctaatgaagactacaga

SEQ ID NO: 46098 - RNA, 21 nt, RNAi
ugcuaaugaagacuacagauu

SEQ ID NO: 46099 - RNA, 21 nt, RNAi
uuacgauuacuucugaugucu

SEQ ID NO: 46100 - DNA, 21 bp, Homo sapiens
aatgaagactacagagaagct

SEQ ID NO: 46101 - RNA, 21 nt, RNAi
ugaagacuacagagaagcuuu

SEQ ID NO: 46102 - RNA, 21 nt, RNAi
uuacuucugaugucucuucga

SEQ ID NO: 46103 - DNA, 21 bp, Homo sapiens
aagactacagagaagcttctt

SEQ ID NO: 46104 - RNA, 21 nt, RNAi
gacuacagagaagcuucuuuu

SEQ ID NO: 46105 - RNA, 21 nt, RNAi
uucugaugucucuucgaagaa

SEQ ID NO: 46106 - DNA, 21 bp, Homo sapiens
aagcttcttcttgtgccgtga

SEQ ID NO: 46107 - RNA, 21 nt, RNAi
gcuucuucuugugccgugauu

SEQ ID NO: 46108 - RNA, 21 nt, RNAi
uucgaagaagaacacggcacu

SEQ ID NO: 46109 - DNA, 21 bp, Homo sapiens
aagaaactccagaaaggaact

SEQ ID NO: 46110 - RNA, 21 nt, RNAi
gaaacuccagaaaggaacuuu

SEQ ID NO: 46111 - RNA, 21 nt, RNAi
uucuuugaggucuuuccuuga

SEQ ID NO: 46112 - DNA, 21 bp, Homo sapiens
aaactccagaaaggaacttaa

SEQ ID NO: 46113 - RNA, 21 nt, RNAi
acuccagaaaggaacuuaauu

SEQ ID NO: 46114 - RNA, 21 nt, RNAi
uuugaggucuuuccuugaauu

SEQ ID NO: 46115 - DNA, 21 bp, Homo sapiens
aactccagaaaggaacttaat

SEQ ID NO: 46116 - RNA, 21 nt, RNAi
cuccagaaaggaacuuaauuu

SEQ ID NO: 46117 - RNA, 21 nt, RNAi
uugaggucuuuccuugaauua

SEQ ID NO: 46118 - DNA, 21 bp, Homo sapiens
aaaggaacttaatgacatacg

SEQ ID NO: 46119 - RNA, 21 nt, RNAi
aggaacuuaaugacauacguu

SEQ ID NO: 46120 - RNA, 21 nt, RNAi
uuuccuugaauuacuguaugc

SEQ ID NO: 46121 - DNA, 21 bp, Homo sapiens
aaggaacttaatgacatacga

SEQ ID NO: 46122 - RNA, 21 nt, RNAi
ggaacuuaaugacauacgauu

SEQ ID NO: 46123 - RNA, 21 nt, RNAi
uuccuugaauuacuguaugcu

SEQ ID NO: 46124 - DNA, 21 bp, Homo sapiens
aagagatacagcagatggtgt

SEQ ID NO: 46125 - RNA, 21 nt, RNAi
gagauacagcagaugguguuu

SEQ ID NO: 46126 - RNA, 21 nt, RNAi
uucucuaugucgucuaccaca

SEQ ID NO: 46127 - DNA, 21 bp, Homo sapiens
aacattgacatttaagttggc

SEQ ID NO: 46128 - RNA, 21 nt, RNAi
cauugacauuuaaguuggcuu

SEQ ID NO: 46129 - RNA, 21 nt, RNAi
uuguaacuguaaauucaaccg

SEQ ID NO: 46130 - DNA, 21 bp, Homo sapiens
aagttggcttctggctgtgat

SEQ ID NO: 46131 - RNA, 21 nt, RNAi
guuggcuucuggcugugauuu

SEQ ID NO: 46132 - RNA, 21 nt, RNAi
uucaaccgaagaccgacacua

SEQ ID NO: 46133 - DNA, 21 bp, Homo sapiens
aaatcagaagattgtgaagag

SEQ ID NO: 46134 - RNA, 21 nt, RNAi
aucagaagauugugaagaguu

SEQ ID NO: 46135 - RNA, 21 nt, RNAi
uuuagucuucuaacacuucuc

SEQ ID NO: 46136 - DNA, 21 bp, Homo sapiens
aatcagaagattgtgaagagg

SEQ ID NO: 46137 - RNA, 21 nt, RNAi
ucagaagauugugaagagguu

SEQ ID NO: 46138 - RNA, 21 nt, RNAi
uuagucuucuaacacuucucc

SEQ ID NO: 46139 - DNA, 21 bp, Homo sapiens
aaacttacaacactccgagtt

SEQ ID NO: 46140 - RNA, 21 nt, RNAi
acuuacaacacuccgaguuuu

SEQ ID NO: 46141 - RNA, 21 nt, RNAi
uuugaauguugugaggcucaa

SEQ ID NO: 46142 - DNA, 21 bp, Homo sapiens
aacttacaacactccgagttc

SEQ ID NO: 46143 - RNA, 21 nt, RNAi
cuuacaacacuccgaguucuu

SEQ ID NO: 46144 - RNA, 21 nt, RNAi
uugaauguugugaggcucaag

SEQ ID NO: 46145 - DNA, 21 bp, Homo sapiens
aacactccgagttctgcttta

SEQ ID NO: 46146 - RNA, 21 nt, RNAi
cacuccgaguucugcuuuauu

SEQ ID NO: 46147 - RNA, 21 nt, RNAi
uugugaggcucaagacgaaau

SEQ ID NO: 46148 - DNA, 21 bp, Homo sapiens
aatccacagtacaagaacaag

SEQ ID NO: 46149 - RNA, 21 nt, RNAi
uccacaguacaagaacaaguu

SEQ ID NO: 46150 - RNA, 21 nt, RNAi
uuaggugucauguucuuguuc

SEQ ID NO: 46151 - DNA, 21 bp, Homo sapiens
aagaacaagcaaatgccacag

SEQ ID NO: 46152 - RNA, 21 nt, RNAi
gaacaagcaaaugccacaguu

SEQ ID NO: 46153 - RNA, 21 nt, RNAi
uucuuguucguuuacgguguc

SEQ ID NO: 46154 - DNA, 21 bp, Homo sapiens
aacaagcaaatgccacagctg

SEQ ID NO: 46155 - RNA, 21 nt, RNAi
caagcaaaugccacagcuguu

SEQ ID NO: 46156 - RNA, 21 nt, RNAi
uuguucguuuacggugucgac

SEQ ID NO: 46157 - DNA, 21 bp, Homo sapiens
aagcaaatgccacagctgcac

SEQ ID NO: 46158 - RNA, 21 nt, RNAi
gcaaaugccacagcugcacuu

SEQ ID NO: 46159 - RNA, 21 nt, RNAi
uucguuuacggugucgacgug

SEQ ID NO: 46160 - DNA, 21 bp, Homo sapiens
aaatgccacagctgcacgact

SEQ ID NO: 46161 - RNA, 21 nt, RNAi
augccacagcugcacgacuuu

SEQ ID NO: 46162 - RNA, 21 nt, RNAi
uuuacggugucgacgugcuga

SEQ ID NO: 46163 - DNA, 21 bp, Homo sapiens
aatgccacagctgcacgactg

SEQ ID NO: 46164 - RNA, 21 nt, RNAi
ugccacagcugcacgacuguu

SEQ ID NO: 46165 - RNA, 21 nt, RNAi
uuacggugucgacgugcugac

SEQ ID NO: 46166 - DNA, 21 bp, Homo sapiens
aagaatctgaaatacactcag

SEQ ID NO: 46167 - RNA, 21 nt, RNAi
gaaucugaaauacacucaguu

SEQ ID NO: 46168 - RNA, 21 nt, RNAi
uucuuagacuuuaugugaguc

SEQ ID NO: 46169 - DNA, 21 bp, Homo sapiens
aatctgaaatacactcaggtg

SEQ ID NO: 46170 - RNA, 21 nt, RNAi
ucugaaauacacucagguguu

SEQ ID NO: 46171 - RNA, 21 nt, RNAi
uuagacuuuaugugaguccac

SEQ ID NO: 46172 - DNA, 21 bp, Homo sapiens
aaatacactcaggtggtctta

SEQ ID NO: 46173 - RNA, 21 nt, RNAi
auacacucagguggucuuauu

SEQ ID NO: 46174 - RNA, 21 nt, RNAi
uuuaugugaguccaccagaau

SEQ ID NO: 46175 - DNA, 21 bp, Homo sapiens
aatacactcaggtggtcttat

SEQ ID NO: 46176 - RNA, 21 nt, RNAi
uacacucagguggucuuauuu

SEQ ID NO: 46177 - RNA, 21 nt, RNAi
uuaugugaguccaccagaaua

SEQ ID NO: 46178 - DNA, 21 bp, Homo sapiens
aagcctatttctcctttcatt

SEQ ID NO: 46179 - RNA, 21 nt, RNAi
gccuauuucuccuuucauuuu

SEQ ID NO: 46180 - RNA, 21 nt, RNAi
uucggauaaagaggaaaguaa

SEQ ID NO: 46181 - DNA, 21 bp, Homo sapiens
aaccaatttacaatctgactg

SEQ ID NO: 46182 - RNA, 21 nt, RNAi
ccaauuuacaaucugacuguu

SEQ ID NO: 46183 - RNA, 21 nt, RNAi
uugguuaaauguuagacugac

SEQ ID NO: 46184 - DNA, 21 bp, Homo sapiens
aatttacaatctgactgtctc

SEQ ID NO: 46185 - RNA, 21 nt, RNAi
uuuacaaucugacugucucuu

SEQ ID NO: 46186 - RNA, 21 nt, RNAi
uuaaauguuagacugacagag

SEQ ID NO: 46187 - DNA, 21 bp, Homo sapiens
aagaatgtgcctgaggctgct

SEQ ID NO: 46188 - RNA, 21 nt, RNAi
gaaugugccugaggcugcuuu

SEQ ID NO: 46189 - RNA, 21 nt, RNAi
uucuuacacggacuccgacga

SEQ ID NO: 46190 - DNA, 21 bp, Homo sapiens
aatgtgcctgaggctgcttta

SEQ ID NO: 46191 - RNA, 21 nt, RNAi
ugugccugaggcugcuuuauu

SEQ ID NO: 46192 - RNA, 21 nt, RNAi
uuacacggacuccgacgaaau

SEQ ID NO: 46193 - DNA, 21 bp, Homo sapiens
aatttcctctatataaggtgg

SEQ ID NO: 46194 - RNA, 21 nt, RNAi
uuuccucuauauaaggugguu

SEQ ID NO: 46195 - RNA, 21 nt, RNAi
uuaaaggagauauauuccacc

SEQ ID NO: 46196 - DNA, 21 bp, Homo sapiens
aaggtggcatatgttaagttt

SEQ ID NO: 46197 - RNA, 21 nt, RNAi
gguggcauauguuaaguuuuu

SEQ ID NO: 46198 - RNA, 21 nt, RNAi
uuccaccguauacaauucaaa

SEQ ID NO: 46199 - DNA, 21 bp, Homo sapiens
aaatgttgccattctgttaga

SEQ ID NO: 46200 - RNA, 21 nt, RNAi
auguugccauucuguuagauu

SEQ ID NO: 46201 - RNA, 21 nt, RNAi
uuuacaacgguaagacaaucu

SEQ ID NO: 46202 - DNA, 21 bp, Homo sapiens
aatgttgccattctgttagat

SEQ ID NO: 46203 - RNA, 21 nt, RNAi
uguugccauucuguuagauuu

SEQ ID NO: 46204 - RNA, 21 nt, RNAi
uuacaacgguaagacaaucua

SEQ ID NO: 46205 - DNA, 21 bp, Homo sapiens
aaacgctgttaaggttcaaga

SEQ ID NO: 46206 - RNA, 21 nt, RNAi
acgcuguuaagguucaagauu

SEQ ID NO: 46207 - RNA, 21 nt, RNAi
uuugcgacaauuccaaguucu

SEQ ID NO: 46208 - DNA, 21 bp, Homo sapiens
aacgctgttaaggttcaagaa

SEQ ID NO: 46209 - RNA, 21 nt, RNAi
cgcuguuaagguucaagaauu

SEQ ID NO: 46210 - RNA, 21 nt, RNAi
uugcgacaauuccaaguucuu

SEQ ID NO: 46211 - DNA, 21 bp, Homo sapiens
aattgttaaggtgttctagag

SEQ ID NO: 46212 - RNA, 21 nt, RNAi
uuguuaagguguucuagaguu

SEQ ID NO: 46213 - RNA, 21 nt, RNAi
uuaacaauuccacaagaucuc

SEQ ID NO: 46214 - DNA, 21 bp, Homo sapiens
aaggtgttctagagccatttg

SEQ ID NO: 46215 - RNA, 21 nt, RNAi
gguguucuagagccauuuguu

SEQ ID NO: 46216 - RNA, 21 nt, RNAi
uuccacaagaucucgguaaac

SEQ ID NO: 46217 - DNA, 21 bp, Homo sapiens
aacgattactcgaagatgact

SEQ ID NO: 46218 - RNA, 21 nt, RNAi
cgauuacucgaagaugacuuu

SEQ ID NO: 46219 - RNA, 21 nt, RNAi
uugcuaaugagcuucuacuga

SEQ ID NO: 46220 - DNA, 21 bp, Homo sapiens
caaaggaagtttcaagtggaa

SEQ ID NO: 46221 - RNA, 21 nt, RNAi
aaggaaguuucaaguggaauu

SEQ ID NO: 46222 - RNA, 21 nt, RNAi
uuuuccuucaaaguucaccuu

SEQ ID NO: 46223 - DNA, 21 bp, Homo sapiens
caagtggaaggtcgtccgtcg

SEQ ID NO: 46224 - RNA, 21 nt, RNAi
aguggaaggucguccgucguu

SEQ ID NO: 46225 - RNA, 21 nt, RNAi
uuucaccuuccagcaggcagc

SEQ ID NO: 46226 - DNA, 21 bp, Homo sapiens
caggaggttatcggcagtgga

SEQ ID NO: 46227 - RNA, 21 nt, RNAi
ggagguuaucggcaguggauu

SEQ ID NO: 46228 - RNA, 21 nt, RNAi
uuccuccaauagccgucaccu

SEQ ID NO: 46229 - DNA, 21 bp, Homo sapiens
cagtggagctactgctgtggt

SEQ ID NO: 46230 - RNA, 21 nt, RNAi
guggagcuacugcugugguuu

SEQ ID NO: 46231 - RNA, 21 nt, RNAi
uucaccucgaugacgacacca

SEQ ID NO: 46232 - DNA, 21 bp, Homo sapiens
caggcaagaacgtgtagcaat

SEQ ID NO: 46233 - RNA, 21 nt, RNAi
ggcaagaacguguagcaauuu

SEQ ID NO: 46234 - RNA, 21 nt, RNAi
uuccguucuugcacaucguua

SEQ ID NO: 46235 - DNA, 21 bp, Homo sapiens
cagaccagtatggatgaacta

SEQ ID NO: 46236 - RNA, 21 nt, RNAi
gaccaguauggaugaacuauu

SEQ ID NO: 46237 - RNA, 21 nt, RNAi
uucuggucauaccuacuugau

SEQ ID NO: 46238 - DNA, 21 bp, Homo sapiens
caagccatgagtcagtgcagc

SEQ ID NO: 46239 - RNA, 21 nt, RNAi
agccaugagucagugcagcuu

SEQ ID NO: 46240 - RNA, 21 nt, RNAi
uuucgguacucagucacgucg

SEQ ID NO: 46241 - DNA, 21 bp, Homo sapiens
catgagtcagtgcagccatcc

SEQ ID NO: 46242 - RNA, 21 nt, RNAi
ugagucagugcagccauccuu

SEQ ID NO: 46243 - RNA, 21 nt, RNAi
uuacucagucacgucgguagg

SEQ ID NO: 46244 - DNA, 21 bp, Homo sapiens
caacgtagtgacctattacac

SEQ ID NO: 46245 - RNA, 21 nt, RNAi
acguagugaccuauuacacuu

SEQ ID NO: 46246 - RNA, 21 nt, RNAi
uuugcaucacuggauaaugug

SEQ ID NO: 46247 - DNA, 21 bp, Homo sapiens
caaagatgaactttggctggt

SEQ ID NO: 46248 - RNA, 21 nt, RNAi
aagaugaacuuuggcugguuu

SEQ ID NO: 46249 - RNA, 21 nt, RNAi
uuuucuacuugaaaccgacca

SEQ ID NO: 46250 - DNA, 21 bp, Homo sapiens
catgaaattactaagtggagg

SEQ ID NO: 46251 - RNA, 21 nt, RNAi
ugaaauuacuaaguggagguu

SEQ ID NO: 46252 - RNA, 21 nt, RNAi
uuacuuuaaugauucaccucc

SEQ ID NO: 46253 - DNA, 21 bp, Homo sapiens
cattgtcaaccgaggagaaca

SEQ ID NO: 46254 - RNA, 21 nt, RNAi
uugucaaccgaggagaacauu

SEQ ID NO: 46255 - RNA, 21 nt, RNAi
uuaacaguuggcuccucuugu

SEQ ID NO: 46256 - DNA, 21 bp, Homo sapiens
caaccgaggagaacacaagaa

SEQ ID NO: 46257 - RNA, 21 nt, RNAi
accgaggagaacacaagaauu

SEQ ID NO: 46258 - RNA, 21 nt, RNAi
uuuggcuccucuuguguucuu

SEQ ID NO: 46259 - DNA, 21 bp, Homo sapiens
cacaagaatggagttctggaa

SEQ ID NO: 46260 - RNA, 21 nt, RNAi
caagaauggaguucuggaauu

SEQ ID NO: 46261 - RNA, 21 nt, RNAi
uuguucuuaccucaagaccuu

SEQ ID NO: 46262 - DNA, 21 bp, Homo sapiens
caagaatggagttctggaaga

SEQ ID NO: 46263 - RNA, 21 nt, RNAi
agaauggaguucuggaagauu

SEQ ID NO: 46264 - RNA, 21 nt, RNAi
uuucuuaccucaagaccuucu

SEQ ID NO: 46265 - DNA, 21 bp, Homo sapiens
cacagaaacggtcagattcac

SEQ ID NO: 46266 - RNA, 21 nt, RNAi
cagaaacggucagauucacuu

SEQ ID NO: 46267 - RNA, 21 nt, RNAi
uugucuuugccagucuaagug

SEQ ID NO: 46268 - DNA, 21 bp, Homo sapiens
cagaaacggtcagattcacag

SEQ ID NO: 46269 - RNA, 21 nt, RNAi
gaaacggucagauucacaguu

SEQ ID NO: 46270 - RNA, 21 nt, RNAi
uucuuugccagucuaaguguc

SEQ ID NO: 46271 - DNA, 21 bp, Homo sapiens
catgttggatggctcctgaag

SEQ ID NO: 46272 - RNA, 21 nt, RNAi
uguuggauggcuccugaaguu

SEQ ID NO: 46273 - RNA, 21 nt, RNAi
uuacaaccuaccgaggacuuc

SEQ ID NO: 46274 - DNA, 21 bp, Homo sapiens
catggaacaggtgagaggcta

SEQ ID NO: 46275 - RNA, 21 nt, RNAi
uggaacaggugagaggcuauu

SEQ ID NO: 46276 - RNA, 21 nt, RNAi
uuaccuuguccacucuccgau

SEQ ID NO: 46277 - DNA, 21 bp, Homo sapiens
caggtgagaggctatgacttc

SEQ ID NO: 46278 - RNA, 21 nt, RNAi
ggugagaggcuaugacuucuu

SEQ ID NO: 46279 - RNA, 21 nt, RNAi
uuccacucuccgauacugaag

SEQ ID NO: 46280 - DNA, 21 bp, Homo sapiens
caaggctgacatgtggagttt

SEQ ID NO: 46281 - RNA, 21 nt, RNAi
aggcugacauguggaguuuuu

SEQ ID NO: 46282 - RNA, 21 nt, RNAi
uuuccgacuguacaccucaaa

SEQ ID NO: 46283 - DNA, 21 bp, Homo sapiens
cattgaattagcaacaggagc

SEQ ID NO: 46284 - RNA, 21 nt, RNAi
uugaauuagcaacaggagcuu

SEQ ID NO: 46285 - RNA, 21 nt, RNAi
uuaacuuaaucguuguccucg

SEQ ID NO: 46286 - DNA, 21 bp, Homo sapiens
caacaggagcagcgccttatc

SEQ ID NO: 46287 - RNA, 21 nt, RNAi
acaggagcagcgccuuaucuu

SEQ ID NO: 46288 - RNA, 21 nt, RNAi
uuuguccucgucgcggaauag

SEQ ID NO: 46289 - DNA, 21 bp, Homo sapiens
caggagcagcgccttatcaca

SEQ ID NO: 46290 - RNA, 21 nt, RNAi
ggagcagcgccuuaucacauu

SEQ ID NO: 46291 - RNA, 21 nt, RNAi
uuccucgucgcggaauagugu

SEQ ID NO: 46292 - DNA, 21 bp, Homo sapiens
cagcgccttatcacaaatatc

SEQ ID NO: 46293 - RNA, 21 nt, RNAi
gcgccuuaucacaaauaucuu

SEQ ID NO: 46294 - RNA, 21 nt, RNAi
uucgcggaauaguguuuauag

SEQ ID NO: 46295 - DNA, 21 bp, Homo sapiens
catgaaagtgttaatgttgac

SEQ ID NO: 46296 - RNA, 21 nt, RNAi
ugaaaguguuaauguugacuu

SEQ ID NO: 46297 - RNA, 21 nt, RNAi
uuacuuucacaauuacaacug

SEQ ID NO: 46298 - DNA, 21 bp, Homo sapiens
cactgtgtcttcagaaagatc

SEQ ID NO: 46299 - RNA, 21 nt, RNAi
cugugucuucagaaagaucuu

SEQ ID NO: 46300 - RNA, 21 nt, RNAi
uugacacagaagucuuucuag

SEQ ID NO: 46301 - DNA, 21 bp, Homo sapiens
caaattcttccagaaagccaa

SEQ ID NO: 46302 - RNA, 21 nt, RNAi
aauucuuccagaaagccaauu

SEQ ID NO: 46303 - RNA, 21 nt, RNAi
uuuuaagaaggucuuucgguu

SEQ ID NO: 46304 - DNA, 21 bp, Homo sapiens
cagaaagccaagaacagagag

SEQ ID NO: 46305 - RNA, 21 nt, RNAi
gaaagccaagaacagagaguu

SEQ ID NO: 46306 - RNA, 21 nt, RNAi
uucuuucgguucuugucucuc

SEQ ID NO: 46307 - DNA, 21 bp, Homo sapiens
caagaacagagagtacctgat

SEQ ID NO: 46308 - RNA, 21 nt, RNAi
agaacagagaguaccugauuu

SEQ ID NO: 46309 - RNA, 21 nt, RNAi
uuucuugucucucauggacua

SEQ ID NO: 46310 - DNA, 21 bp, Homo sapiens
cagagagtacctgattgagaa

SEQ ID NO: 46311 - RNA, 21 nt, RNAi
gagaguaccugauugagaauu

SEQ ID NO: 46312 - RNA, 21 nt, RNAi
uucucucauggacuaacucuu

SEQ ID NO: 46313 - DNA, 21 bp, Homo sapiens
cagagattgcagtgagtgcca

SEQ ID NO: 46314 - RNA, 21 nt, RNAi
gagauugcagugagugccauu

SEQ ID NO: 46315 - RNA, 21 nt, RNAi
uucucuaacgucacucacggu

SEQ ID NO: 46316 - DNA, 21 bp, Homo sapiens
cagtgagtgccagcaccatcc

SEQ ID NO: 46317 - RNA, 21 nt, RNAi
gugagugccagcaccauccuu

SEQ ID NO: 46318 - RNA, 21 nt, RNAi
uucacucacggucgugguagg

SEQ ID NO: 46319 - DNA, 21 bp, Homo sapiens
caatgctaatgaagactacag

SEQ ID NO: 46320 - RNA, 21 nt, RNAi
augcuaaugaagacuacaguu

SEQ ID NO: 46321 - RNA, 21 nt, RNAi
uuuacgauuacuucugauguc

SEQ ID NO: 46322 - DNA, 21 bp, Homo sapiens
cagagaagcttcttcttgtgc

SEQ ID NO: 46323 - RNA, 21 nt, RNAi
gagaagcuucuucuugugcuu

SEQ ID NO: 46324 - RNA, 21 nt, RNAi
uucucuucgaagaagaacacg

SEQ ID NO: 46325 - DNA, 21 bp, Homo sapiens
cagaaaggaacttaatgacat

SEQ ID NO: 46326 - RNA, 21 nt, RNAi
gaaaggaacuuaaugacauuu

SEQ ID NO: 46327 - RNA, 21 nt, RNAi
uucuuuccuugaauuacugua

SEQ ID NO: 46328 - DNA, 21 bp, Homo sapiens
catacgatttgagtttactcc

SEQ ID NO: 46329 - RNA, 21 nt, RNAi
uacgauuugaguuuacuccuu

SEQ ID NO: 46330 - RNA, 21 nt, RNAi
uuaugcuaaacucaaaugagg

SEQ ID NO: 46331 - DNA, 21 bp, Homo sapiens
caggaagagatacagcagatg

SEQ ID NO: 46332 - RNA, 21 nt, RNAi
ggaagagauacagcagauguu

SEQ ID NO: 46333 - RNA, 21 nt, RNAi
uuccuucucuaugucgucuac

SEQ ID NO: 46334 - DNA, 21 bp, Homo sapiens
cagcagatggtgtatctcagg

SEQ ID NO: 46335 - RNA, 21 nt, RNAi
gcagaugguguaucucagguu

SEQ ID NO: 46336 - RNA, 21 nt, RNAi
uucgucuaccacauagagucc

SEQ ID NO: 46337 - DNA, 21 bp, Homo sapiens
cagatggtgtatctcaggagc

SEQ ID NO: 46338 - RNA, 21 nt, RNAi
gaugguguaucucaggagcuu

SEQ ID NO: 46339 - RNA, 21 nt, RNAi
uucuaccacauagaguccucg

SEQ ID NO: 46340 - DNA, 21 bp, Homo sapiens
caggagctcttctctgctggc

SEQ ID NO: 46341 - RNA, 21 nt, RNAi
ggagcucuucucugcuggcuu

SEQ ID NO: 46342 - RNA, 21 nt, RNAi
uuccucgagaagagacgaccg

SEQ ID NO: 46343 - DNA, 21 bp, Homo sapiens
cacgatgtagttatagtggct

SEQ ID NO: 46344 - RNA, 21 nt, RNAi
cgauguaguuauaguggcuuu

SEQ ID NO: 46345 - RNA, 21 nt, RNAi
uugcuacaucaauaucaccga

SEQ ID NO: 46346 - DNA, 21 bp, Homo sapiens
cattgacatttaagttggctt

SEQ ID NO: 46347 - RNA, 21 nt, RNAi
uugacauuuaaguuggcuuuu

SEQ ID NO: 46348 - RNA, 21 nt, RNAi
uuaacuguaaauucaaccgaa

SEQ ID NO: 46349 - DNA, 21 bp, Homo sapiens
catttaagttggcttctggct

SEQ ID NO: 46350 - RNA, 21 nt, RNAi
uuuaaguuggcuucuggcuuu

SEQ ID NO: 46351 - RNA, 21 nt, RNAi
uuaaauucaaccgaagaccga

SEQ ID NO: 46352 - DNA, 21 bp, Homo sapiens
cagttgagtgtcagctgatgt

SEQ ID NO: 46353 - RNA, 21 nt, RNAi
guugagugucagcugauguuu

SEQ ID NO: 46354 - RNA, 21 nt, RNAi
uucaacucacagucgacuaca

SEQ ID NO: 46355 - DNA, 21 bp, Homo sapiens
cagaagattgtgaagaggccg

SEQ ID NO: 46356 - RNA, 21 nt, RNAi
gaagauugugaagaggccguu

SEQ ID NO: 46357 - RNA, 21 nt, RNAi
uucuucuaacacuucuccggc

SEQ ID NO: 46358 - DNA, 21 bp, Homo sapiens
caacactccgagttctgcttt

SEQ ID NO: 46359 - RNA, 21 nt, RNAi
acacuccgaguucugcuuuuu

SEQ ID NO: 46360 - RNA, 21 nt, RNAi
uuugugaggcucaagacgaaa

SEQ ID NO: 46361 - DNA, 21 bp, Homo sapiens
cactccgagttctgctttatt

SEQ ID NO: 46362 - RNA, 21 nt, RNAi
cuccgaguucugcuuuauuuu

SEQ ID NO: 46363 - RNA, 21 nt, RNAi
uugaggcucaagacgaaauaa

SEQ ID NO: 46364 - DNA, 21 bp, Homo sapiens
caatccacagtacaagaacaa

SEQ ID NO: 46365 - RNA, 21 nt, RNAi
auccacaguacaagaacaauu

SEQ ID NO: 46366 - RNA, 21 nt, RNAi
uuuaggugucauguucuuguu

SEQ ID NO: 46367 - DNA, 21 bp, Homo sapiens
cacagtacaagaacaagcaaa

SEQ ID NO: 46368 - RNA, 21 nt, RNAi
caguacaagaacaagcaaauu

SEQ ID NO: 46369 - RNA, 21 nt, RNAi
uugucauguucuuguucguuu

SEQ ID NO: 46370 - DNA, 21 bp, Homo sapiens
cagtacaagaacaagcaaatg

SEQ ID NO: 46371 - RNA, 21 nt, RNAi
guacaagaacaagcaaauguu

SEQ ID NO: 46372 - RNA, 21 nt, RNAi
uucauguucuuguucguuuac

SEQ ID NO: 46373 - DNA, 21 bp, Homo sapiens
caagaacaagcaaatgccaca

SEQ ID NO: 46374 - RNA, 21 nt, RNAi
agaacaagcaaaugccacauu

SEQ ID NO: 46375 - RNA, 21 nt, RNAi
uuucuuguucguuuacggugu

SEQ ID NO: 46376 - DNA, 21 bp, Homo sapiens
caagcaaatgccacagctgca

SEQ ID NO: 46377 - RNA, 21 nt, RNAi
agcaaaugccacagcugcauu

SEQ ID NO: 46378 - RNA, 21 nt, RNAi
uuucguuuacggugucgacgu

SEQ ID NO: 46379 - DNA, 21 bp, Homo sapiens
caaatgccacagctgcacgac

SEQ ID NO: 46380 - RNA, 21 nt, RNAi
aaugccacagcugcacgacuu

SEQ ID NO: 46381 - RNA, 21 nt, RNAi
uuuuacggugucgacgugcug

SEQ ID NO: 46382 - DNA, 21 bp, Homo sapiens
cacagctgcacgactgttgct

SEQ ID NO: 46383 - RNA, 21 nt, RNAi
cagcugcacgacuguugcuuu

SEQ ID NO: 46384 - RNA, 21 nt, RNAi
uugucgacgugcugacaacga

SEQ ID NO: 46385 - DNA, 21 bp, Homo sapiens
cagctgcacgactgttgctca

SEQ ID NO: 46386 - RNA, 21 nt, RNAi
gcugcacgacuguugcucauu

SEQ ID NO: 46387 - RNA, 21 nt, RNAi
uucgacgugcugacaacgagu

SEQ ID NO: 46388 - DNA, 21 bp, Homo sapiens
cactcaggtggtcttatttat

SEQ ID NO: 46389 - RNA, 21 nt, RNAi
cucagguggucuuauuuauuu

SEQ ID NO: 46390 - RNA, 21 nt, RNAi
uugaguccaccagaauaaaua

SEQ ID NO: 46391 - DNA, 21 bp, Homo sapiens
caggtggtcttatttattggc

SEQ ID NO: 46392 - RNA, 21 nt, RNAi
gguggucuuauuuauuggcuu

SEQ ID NO: 46393 - RNA, 21 nt, RNAi
uuccaccagaauaaauaaccg

SEQ ID NO: 46394 - DNA, 21 bp, Homo sapiens
cagaagcctatttctcctttc

SEQ ID NO: 46395 - RNA, 21 nt, RNAi
gaagccuauuucuccuuucuu

SEQ ID NO: 46396 - RNA, 21 nt, RNAi
uucuucggauaaagaggaaag

SEQ ID NO: 46397 - DNA, 21 bp, Homo sapiens
catctgacaatactgcctctt

SEQ ID NO: 46398 - RNA, 21 nt, RNAi
ucugacaauacugccucuuuu

SEQ ID NO: 46399 - RNA, 21 nt, RNAi
uuagacuguuaugacggagaa

SEQ ID NO: 46400 - DNA, 21 bp, Homo sapiens
cattacacaccttagctataa

SEQ ID NO: 46401 - RNA, 21 nt, RNAi
uuacacaccuuagcuauaauu

SEQ ID NO: 46402 - RNA, 21 nt, RNAi
uuaauguguggaaucgauauu

SEQ ID NO: 46403 - DNA, 21 bp, Homo sapiens
caatttacaatctgactgtct

SEQ ID NO: 46404 - RNA, 21 nt, RNAi
auuuacaaucugacugucuuu

SEQ ID NO: 46405 - RNA, 21 nt, RNAi
uuuaaauguuagacugacaga

SEQ ID NO: 46406 - DNA, 21 bp, Homo sapiens
cacattaagaatgtgcctgag

SEQ ID NO: 46407 - RNA, 21 nt, RNAi
cauuaagaaugugccugaguu

SEQ ID NO: 46408 - RNA, 21 nt, RNAi
uuguaauucuuacacggacuc

SEQ ID NO: 46409 - DNA, 21 bp, Homo sapiens
cattaagaatgtgcctgaggc

SEQ ID NO: 46410 - RNA, 21 nt, RNAi
uuaagaaugugccugaggcuu

SEQ ID NO: 46411 - RNA, 21 nt, RNAi
uuaauucuuacacggacuccg

SEQ ID NO: 46412 - DNA, 21 bp, Homo sapiens
cattggaccgtttagaatgct

SEQ ID NO: 46413 - RNA, 21 nt, RNAi
uuggaccguuuagaaugcuuu

SEQ ID NO: 46414 - RNA, 21 nt, RNAi
uuaaccuggcaaaucuuacga

SEQ ID NO: 46415 - DNA, 21 bp, Homo sapiens
cattctgttagattgctaact

SEQ ID NO: 46416 - RNA, 21 nt, RNAi
uucuguuagauugcuaacuuu

SEQ ID NO: 46417 - RNA, 21 nt, RNAi
uuaagacaaucuaacgauuga

SEQ ID NO: 46418 - DNA, 21 bp, Homo sapiens
catctctgatttggctctcct

SEQ ID NO: 46419 - RNA, 21 nt, RNAi
ucucugauuuggcucuccuuu

SEQ ID NO: 46420 - RNA, 21 nt, RNAi
uuagagacuaaaccgagagga

SEQ ID NO: 46421 - DNA, 21 bp, Homo sapiens
caagaatcaatactttcaacc

SEQ ID NO: 46422 - RNA, 21 nt, RNAi
agaaucaauacuuucaaccuu

SEQ ID NO: 46423 - RNA, 21 nt, RNAi
uuucuuaguuaugaaaguugg

SEQ ID NO: 46424 - DNA, 21 bp, Homo sapiens
caggatggtaccattgctctt

SEQ ID NO: 46425 - RNA, 21 nt, RNAi
ggaugguaccauugcucuuuu

SEQ ID NO: 46426 - RNA, 21 nt, RNAi
uuccuaccaugguaacgagaa

SEQ ID NO: 46427 - DNA, 21 bp, Homo sapiens
cattgctctttcctagctaac

SEQ ID NO: 46428 - RNA, 21 nt, RNAi
uugcucuuuccuagcuaacuu

SEQ ID NO: 46429 - RNA, 21 nt, RNAi
uuaacgagaaaggaucgauug

SEQ ID NO: 46430 - DNA, 21 bp, Homo sapiens
cagctctttaatgtacttcaa

SEQ ID NO: 46431 - RNA, 21 nt, RNAi
gcucuuuaauguacuucaauu

SEQ ID NO: 46432 - RNA, 21 nt, RNAi
uucgagaaauuacaugaaguu

SEQ ID NO: 46433 - DNA, 21 bp, Homo sapiens
cattctattgtttacacaacg

SEQ ID NO: 46434 - RNA, 21 nt, RNAi
uucuauuguuuacacaacguu

SEQ ID NO: 46435 - RNA, 21 nt, RNAi
uuaagauaacaaauguguugc

SEQ ID NO: 46436 - DNA, 21 bp, Homo sapiens
cacaacgattactcgaagatg

SEQ ID NO: 46437 - RNA, 21 nt, RNAi
caacgauuacucgaagauguu

SEQ ID NO: 46438 - RNA, 21 nt, RNAi
uuguugcuaaugagcuucuac

SEQ ID NO: 46439 - DNA, 21 bp, Homo sapiens
caacgattactcgaagatgac

SEQ ID NO: 46440 - RNA, 21 nt, RNAi
acgauuacucgaagaugacuu

SEQ ID NO: 46441 - RNA, 21 nt, RNAi
uuugcuaaugagcuucuacug

SEQ ID NO: 46442 - DNA, 21 bp, Homo sapiens
gaggcaaaggaagtttcaagt

SEQ ID NO: 46443 - RNA, 21 nt, RNAi
ggcaaaggaaguuucaaguuu

SEQ ID NO: 46444 - RNA, 21 nt, RNAi
uuccguuuccuucaaaguuca

SEQ ID NO: 46445 - DNA, 21 bp, Homo sapiens
gaagtttcaagtggaaggtcg

SEQ ID NO: 46446 - RNA, 21 nt, RNAi
aguuucaaguggaaggucguu

SEQ ID NO: 46447 - RNA, 21 nt, RNAi
uuucaaaguucaccuuccagc

SEQ ID NO: 46448 - DNA, 21 bp, Homo sapiens
gagctgcaggaggttatcggc

SEQ ID NO: 46449 - RNA, 21 nt, RNAi
gcugcaggagguuaucggcuu

SEQ ID NO: 46450 - RNA, 21 nt, RNAi
uucgacguccuccaauagccg

SEQ ID NO: 46451 - DNA, 21 bp, Homo sapiens
gaggttatcggcagtggagct

SEQ ID NO: 46452 - RNA, 21 nt, RNAi
gguuaucggcaguggagcuuu

SEQ ID NO: 46453 - RNA, 21 nt, RNAi
uuccaauagccgucaccucga

SEQ ID NO: 46454 - DNA, 21 bp, Homo sapiens
gagctactgctgtggttcagg

SEQ ID NO: 46455 - RNA, 21 nt, RNAi
gcuacugcugugguucagguu

SEQ ID NO: 46456 - RNA, 21 nt, RNAi
uucgaugacgacaccaagucc

SEQ ID NO: 46457 - DNA, 21 bp, Homo sapiens
gaccagtatggatgaactatt

SEQ ID NO: 46458 - RNA, 21 nt, RNAi
ccaguauggaugaacuauuuu

SEQ ID NO: 46459 - RNA, 21 nt, RNAi
uuggucauaccuacuugauaa

SEQ ID NO: 46460 - DNA, 21 bp, Homo sapiens
gaaattcaagccatgagtcag

SEQ ID NO: 46461 - RNA, 21 nt, RNAi
aauucaagccaugagucaguu

SEQ ID NO: 46462 - RNA, 21 nt, RNAi
uuuuaaguucgguacucaguc

SEQ ID NO: 46463 - DNA, 21 bp, Homo sapiens
gatgaactttggctggtcatg

SEQ ID NO: 46464 - RNA, 21 nt, RNAi
ugaacuuuggcuggucauguu

SEQ ID NO: 46465 - RNA, 21 nt, RNAi
uuacuugaaaccgaccaguac

SEQ ID NO: 46466 - DNA, 21 bp, Homo sapiens
gaactttggctggtcatgaaa

SEQ ID NO: 46467 - RNA, 21 nt, RNAi
acuuuggcuggucaugaaauu

SEQ ID NO: 46468 - RNA, 21 nt, RNAi
uuugaaaccgaccaguacuuu

SEQ ID NO: 46469 - DNA, 21 bp, Homo sapiens
gaaattactaagtggaggttc

SEQ ID NO: 46470 - RNA, 21 nt, RNAi
aauuacuaaguggagguucuu

SEQ ID NO: 46471 - RNA, 21 nt, RNAi
uuuuaaugauucaccuccaag

SEQ ID NO: 46472 - DNA, 21 bp, Homo sapiens
gaggttcaatgttggatatca

SEQ ID NO: 46473 - RNA, 21 nt, RNAi
gguucaauguuggauaucauu

SEQ ID NO: 46474 - RNA, 21 nt, RNAi
uuccaaguuacaaccuauagu

SEQ ID NO: 46475 - DNA, 21 bp, Homo sapiens
gaggagaacacaagaatggag

SEQ ID NO: 46476 - RNA, 21 nt, RNAi
ggagaacacaagaauggaguu

SEQ ID NO: 46477 - RNA, 21 nt, RNAi
uuccucuuguguucuuaccuc

SEQ ID NO: 46478 - DNA, 21 bp, Homo sapiens
gagaacacaagaatggagttc

SEQ ID NO: 46479 - RNA, 21 nt, RNAi
gaacacaagaauggaguucuu

SEQ ID NO: 46480 - RNA, 21 nt, RNAi
uucuuguguucuuaccucaag

SEQ ID NO: 46481 - DNA, 21 bp, Homo sapiens
gaacacaagaatggagttctg

SEQ ID NO: 46482 - RNA, 21 nt, RNAi
acacaagaauggaguucuguu

SEQ ID NO: 46483 - RNA, 21 nt, RNAi
uuuguguucuuaccucaagac

SEQ ID NO: 46484 - DNA, 21 bp, Homo sapiens
gaatggagttctggaagaggc

SEQ ID NO: 46485 - RNA, 21 nt, RNAi
auggaguucuggaagaggcuu

SEQ ID NO: 46486 - RNA, 21 nt, RNAi
uuuaccucaagaccuucuccg

SEQ ID NO: 46487 - DNA, 21 bp, Homo sapiens
gagttctggaagaggcaataa

SEQ ID NO: 46488 - RNA, 21 nt, RNAi
guucuggaagaggcaauaauu

SEQ ID NO: 46489 - RNA, 21 nt, RNAi
uucaagaccuucuccguuauu

SEQ ID NO: 46490 - DNA, 21 bp, Homo sapiens
gaagaggcaataatagcaaca

SEQ ID NO: 46491 - RNA, 21 nt, RNAi
agaggcaauaauagcaacauu

SEQ ID NO: 46492 - RNA, 21 nt, RNAi
uuucuccguuauuaucguugu

SEQ ID NO: 46493 - DNA, 21 bp, Homo sapiens
gaggcaataatagcaacaatt

SEQ ID NO: 46494 - RNA, 21 nt, RNAi
ggcaauaauagcaacaauuuu

SEQ ID NO: 46495 - RNA, 21 nt, RNAi
uuccguuauuaucguuguuaa

SEQ ID NO: 46496 - DNA, 21 bp, Homo sapiens
gaaggcttagactatctacac

SEQ ID NO: 46497 - RNA, 21 nt, RNAi
aggcuuagacuaucuacacuu

SEQ ID NO: 46498 - RNA, 21 nt, RNAi
uuuccgaaucugauagaugug

SEQ ID NO: 46499 - DNA, 21 bp, Homo sapiens
gactatctacacagaaacggt

SEQ ID NO: 46500 - RNA, 21 nt, RNAi
cuaucuacacagaaacgguuu

SEQ ID NO: 46501 - RNA, 21 nt, RNAi
uugauagaugugucuuugcca

SEQ ID NO: 46502 - DNA, 21 bp, Homo sapiens
gaaagctggtaatattcttct

SEQ ID NO: 46503 - RNA, 21 nt, RNAi
aagcugguaauauucuucuuu

SEQ ID NO: 46504 - RNA, 21 nt, RNAi
uuuucgaccauuauaagaaga

SEQ ID NO: 46505 - DNA, 21 bp, Homo sapiens
gaggatggttcagtacaaata

SEQ ID NO: 46506 - RNA, 21 nt, RNAi
ggaugguucaguacaaauauu

SEQ ID NO: 46507 - RNA, 21 nt, RNAi
uuccuaccaagucauguuuau

SEQ ID NO: 46508 - DNA, 21 bp, Homo sapiens
gatggttcagtacaaatagca

SEQ ID NO: 46509 - RNA, 21 nt, RNAi
ugguucaguacaaauagcauu

SEQ ID NO: 46510 - RNA, 21 nt, RNAi
uuaccaagucauguuuaucgu

SEQ ID NO: 46511 - DNA, 21 bp, Homo sapiens
gatggctcctgaagtcatgga

SEQ ID NO: 46512 - RNA, 21 nt, RNAi
uggcuccugaagucauggauu

SEQ ID NO: 46513 - RNA, 21 nt, RNAi
uuaccgaggacuucaguaccu

SEQ ID NO: 46514 - DNA, 21 bp, Homo sapiens
gaagtcatggaacaggtgaga

SEQ ID NO: 46515 - RNA, 21 nt, RNAi
agucauggaacaggugagauu

SEQ ID NO: 46516 - RNA, 21 nt, RNAi
uuucaguaccuuguccacucu

SEQ ID NO: 46517 - DNA, 21 bp, Homo sapiens
gaacaggtgagaggctatgac

SEQ ID NO: 46518 - RNA, 21 nt, RNAi
acaggugagaggcuaugacuu

SEQ ID NO: 46519 - RNA, 21 nt, RNAi
uuuguccacucuccgauacug

SEQ ID NO: 46520 - DNA, 21 bp, Homo sapiens
gagaggctatgacttcaaggc

SEQ ID NO: 46521 - RNA, 21 nt, RNAi
gaggcuaugacuucaaggcuu

SEQ ID NO: 46522 - RNA, 21 nt, RNAi
uucuccgauacugaaguuccg

SEQ ID NO: 46523 - DNA, 21 bp, Homo sapiens
gaggctatgacttcaaggctg

SEQ ID NO: 46524 - RNA, 21 nt, RNAi
ggcuaugacuucaaggcuguu

SEQ ID NO: 46525 - RNA, 21 nt, RNAi
uuccgauacugaaguuccgac

SEQ ID NO: 46526 - DNA, 21 bp, Homo sapiens
gacttcaaggctgacatgtgg

SEQ ID NO: 46527 - RNA, 21 nt, RNAi
cuucaaggcugacaugugguu

SEQ ID NO: 46528 - RNA, 21 nt, RNAi
uugaaguuccgacuguacacc

SEQ ID NO: 46529 - DNA, 21 bp, Homo sapiens
gaataactgccattgaattag

SEQ ID NO: 46530 - RNA, 21 nt, RNAi
auaacugccauugaauuaguu

SEQ ID NO: 46531 - RNA, 21 nt, RNAi
uuuauugacgguaacuuaauc

SEQ ID NO: 46532 - DNA, 21 bp, Homo sapiens
gaattagcaacaggagcagcg

SEQ ID NO: 46533 - RNA, 21 nt, RNAi
auuagcaacaggagcagcguu

SEQ ID NO: 46534 - RNA, 21 nt, RNAi
uuuaaucguuguccucgucgc

SEQ ID NO: 46535 - DNA, 21 bp, Homo sapiens
gagcagcgccttatcacaaat

SEQ ID NO: 46536 - RNA, 21 nt, RNAi
gcagcgccuuaucacaaauuu

SEQ ID NO: 46537 - RNA, 21 nt, RNAi
uucgucgcggaauaguguuua

SEQ ID NO: 46538 - DNA, 21 bp, Homo sapiens
gaaagccaagaacagagagta

SEQ ID NO: 46539 - RNA, 21 nt, RNAi
aagccaagaacagagaguauu

SEQ ID NO: 46540 - RNA, 21 nt, RNAi
uuuucgguucuugucucucau

SEQ ID NO: 46541 - DNA, 21 bp, Homo sapiens
gaacagagagtacctgattga

SEQ ID NO: 46542 - RNA, 21 nt, RNAi
acagagaguaccugauugauu

SEQ ID NO: 46543 - RNA, 21 nt, RNAi
uuugucucucauggacuaacu

SEQ ID NO: 46544 - DNA, 21 bp, Homo sapiens
gagagtacctgattgagaagc

SEQ ID NO: 46545 - RNA, 21 nt, RNAi
gaguaccugauugagaagcuu

SEQ ID NO: 46546 - RNA, 21 nt, RNAi
uucucauggacuaacucuucg

SEQ ID NO: 46547 - DNA, 21 bp, Homo sapiens
gagtacctgattgagaagctg

SEQ ID NO: 46548 - RNA, 21 nt, RNAi
guaccugauugagaagcuguu

SEQ ID NO: 46549 - RNA, 21 nt, RNAi
uucauggacuaacucuucgac

SEQ ID NO: 46550 - DNA, 21 bp, Homo sapiens
gattgagaagctgcttacaag

SEQ ID NO: 46551 - RNA, 21 nt, RNAi
uugagaagcugcuuacaaguu

SEQ ID NO: 46552 - RNA, 21 nt, RNAi
uuaacucuucgacgaauguuc

SEQ ID NO: 46553 - DNA, 21 bp, Homo sapiens
gagaagctgcttacaagaaca

SEQ ID NO: 46554 - RNA, 21 nt, RNAi
gaagcugcuuacaagaacauu

SEQ ID NO: 46555 - RNA, 21 nt, RNAi
uucuucgacgaauguucuugu

SEQ ID NO: 46556 - DNA, 21 bp, Homo sapiens
gaagctgcttacaagaacacc

SEQ ID NO: 46557 - RNA, 21 nt, RNAi
agcugcuuacaagaacaccuu

SEQ ID NO: 46558 - RNA, 21 nt, RNAi
uuucgacgaauguucuugugg

SEQ ID NO: 46559 - DNA, 21 bp, Homo sapiens
gagtggagtgacgacgagatg

SEQ ID NO: 46560 - RNA, 21 nt, RNAi
guggagugacgacgagauguu

SEQ ID NO: 46561 - RNA, 21 nt, RNAi
uucaccucacugcugcucuac

SEQ ID NO: 46562 - DNA, 21 bp, Homo sapiens
gagtgacgacgagatggatga

SEQ ID NO: 46563 - RNA, 21 nt, RNAi
gugacgacgagauggaugauu

SEQ ID NO: 46564 - RNA, 21 nt, RNAi
uucacugcugcucuaccuacu

SEQ ID NO: 46565 - DNA, 21 bp, Homo sapiens
gacgacgagatggatgagaag

SEQ ID NO: 46566 - RNA, 21 nt, RNAi
cgacgagauggaugagaaguu

SEQ ID NO: 46567 - RNA, 21 nt, RNAi
uugcugcucuaccuacucuuc

SEQ ID NO: 46568 - DNA, 21 bp, Homo sapiens
gacgagatggatgagaagagc

SEQ ID NO: 46569 - RNA, 21 nt, RNAi
cgagauggaugagaagagcuu

SEQ ID NO: 46570 - RNA, 21 nt, RNAi
uugcucuaccuacucuucucg

SEQ ID NO: 46571 - DNA, 21 bp, Homo sapiens
gagatggatgagaagagcgaa

SEQ ID NO: 46572 - RNA, 21 nt, RNAi
gauggaugagaagagcgaauu

SEQ ID NO: 46573 - RNA, 21 nt, RNAi
uucuaccuacucuucucgcuu

SEQ ID NO: 46574 - DNA, 21 bp, Homo sapiens
gatggatgagaagagcgaaga

SEQ ID NO: 46575 - RNA, 21 nt, RNAi
uggaugagaagagcgaagauu

SEQ ID NO: 46576 - RNA, 21 nt, RNAi
uuaccuacucuucucgcuucu

SEQ ID NO: 46577 - DNA, 21 bp, Homo sapiens
gagattgcagtgagtgccagc

SEQ ID NO: 46578 - RNA, 21 nt, RNAi
gauugcagugagugccagcuu

SEQ ID NO: 46579 - RNA, 21 nt, RNAi
uucuaacgucacucacggucg

SEQ ID NO: 46580 - DNA, 21 bp, Homo sapiens
gattgcagtgagtgccagcac

SEQ ID NO: 46581 - RNA, 21 nt, RNAi
uugcagugagugccagcacuu

SEQ ID NO: 46582 - RNA, 21 nt, RNAi
uuaacgucacucacggucgug

SEQ ID NO: 46583 - DNA, 21 bp, Homo sapiens
gaagactacagagaagcttct

SEQ ID NO: 46584 - RNA, 21 nt, RNAi
agacuacagagaagcuucuuu

SEQ ID NO: 46585 - RNA, 21 nt, RNAi
uuucugaugucucuucgaaga

SEQ ID NO: 46586 - DNA, 21 bp, Homo sapiens
gactacagagaagcttcttct

SEQ ID NO: 46587 - RNA, 21 nt, RNAi
cuacagagaagcuucuucuuu

SEQ ID NO: 46588 - RNA, 21 nt, RNAi
uugaugucucuucgaagaaga

SEQ ID NO: 46589 - DNA, 21 bp, Homo sapiens
gagaagcttcttcttgtgccg

SEQ ID NO: 46590 - RNA, 21 nt, RNAi
gaagcuucuucuugugccguu

SEQ ID NO: 46591 - RNA, 21 nt, RNAi
uucuucgaagaagaacacggc

SEQ ID NO: 46592 - DNA, 21 bp, Homo sapiens
gaagcttcttcttgtgccgtg

SEQ ID NO: 46593 - RNA, 21 nt, RNAi
agcuucuucuugugccguguu

SEQ ID NO: 46594 - RNA, 21 nt, RNAi
uuucgaagaagaacacggcac

SEQ ID NO: 46595 - DNA, 21 bp, Homo sapiens
gagattaagaaactccagaaa

SEQ ID NO: 46596 - RNA, 21 nt, RNAi
gauuaagaaacuccagaaauu

SEQ ID NO: 46597 - RNA, 21 nt, RNAi
uucuaauucuuugaggucuuu

SEQ ID NO: 46598 - DNA, 21 bp, Homo sapiens
gattaagaaactccagaaagg

SEQ ID NO: 46599 - RNA, 21 nt, RNAi
uuaagaaacuccagaaagguu

SEQ ID NO: 46600 - RNA, 21 nt, RNAi
uuaauucuuugaggucuuucc

SEQ ID NO: 46601 - DNA, 21 bp, Homo sapiens
gaaactccagaaaggaactta

SEQ ID NO: 46602 - RNA, 21 nt, RNAi
aacuccagaaaggaacuuauu

SEQ ID NO: 46603 - RNA, 21 nt, RNAi
uuuugaggucuuuccuugaau

SEQ ID NO: 46604 - DNA, 21 bp, Homo sapiens
gaaaggaacttaatgacatac

SEQ ID NO: 46605 - RNA, 21 nt, RNAi
aaggaacuuaaugacauacuu

SEQ ID NO: 46606 - RNA, 21 nt, RNAi
uuuuccuugaauuacuguaug

SEQ ID NO: 46607 - DNA, 21 bp, Homo sapiens
gacatacgatttgagtttact

SEQ ID NO: 46608 - RNA, 21 nt, RNAi
cauacgauuugaguuuacuuu

SEQ ID NO: 46609 - RNA, 21 nt, RNAi
uuguaugcuaaacucaaauga

SEQ ID NO: 46610 - DNA, 21 bp, Homo sapiens
gatttgagtttactccaggaa

SEQ ID NO: 46611 - RNA, 21 nt, RNAi
uuugaguuuacuccaggaauu

SEQ ID NO: 46612 - RNA, 21 nt, RNAi
uuaaacucaaaugagguccuu

SEQ ID NO: 46613 - DNA, 21 bp, Homo sapiens
gagtttactccaggaagagat

SEQ ID NO: 46614 - RNA, 21 nt, RNAi
guuuacuccaggaagagauuu

SEQ ID NO: 46615 - RNA, 21 nt, RNAi
uucaaaugagguccuucucua

SEQ ID NO: 46616 - DNA, 21 bp, Homo sapiens
gaagagatacagcagatggtg

SEQ ID NO: 46617 - RNA, 21 nt, RNAi
agagauacagcagaugguguu

SEQ ID NO: 46618 - RNA, 21 nt, RNAi
uuucucuaugucgucuaccac

SEQ ID NO: 46619 - DNA, 21 bp, Homo sapiens
gagatacagcagatggtgtat

SEQ ID NO: 46620 - RNA, 21 nt, RNAi
gauacagcagaugguguauuu

SEQ ID NO: 46621 - RNA, 21 nt, RNAi
uucuaugucgucuaccacaua

SEQ ID NO: 46622 - DNA, 21 bp, Homo sapiens
gatacagcagatggtgtatct

SEQ ID NO: 46623 - RNA, 21 nt, RNAi
uacagcagaugguguaucuuu

SEQ ID NO: 46624 - RNA, 21 nt, RNAi
uuaugucgucuaccacauaga

SEQ ID NO: 46625 - DNA, 21 bp, Homo sapiens
gatggtgtatctcaggagctc

SEQ ID NO: 46626 - RNA, 21 nt, RNAi
ugguguaucucaggagcucuu

SEQ ID NO: 46627 - RNA, 21 nt, RNAi
uuaccacauagaguccucgag

SEQ ID NO: 46628 - DNA, 21 bp, Homo sapiens
gagctcttctctgctggcttg

SEQ ID NO: 46629 - RNA, 21 nt, RNAi
gcucuucucugcuggcuuguu

SEQ ID NO: 46630 - RNA, 21 nt, RNAi
uucgagaagagacgaccgaac

SEQ ID NO: 46631 - DNA, 21 bp, Homo sapiens
gatggtcacgatgtagttata

SEQ ID NO: 46632 - RNA, 21 nt, RNAi
uggucacgauguaguuauauu

SEQ ID NO: 46633 - RNA, 21 nt, RNAi
uuaccagugcuacaucaauau

SEQ ID NO: 46634 - DNA, 21 bp, Homo sapiens
gatgtagttatagtggctgct

SEQ ID NO: 46635 - RNA, 21 nt, RNAi
uguaguuauaguggcugcuuu

SEQ ID NO: 46636 - RNA, 21 nt, RNAi
uuacaucaauaucaccgacga

SEQ ID NO: 46637 - DNA, 21 bp, Homo sapiens
gacatttaagttggcttctgg

SEQ ID NO: 46638 - RNA, 21 nt, RNAi
cauuuaaguuggcuucugguu

SEQ ID NO: 46639 - RNA, 21 nt, RNAi
uuguaaauucaaccgaagacc

SEQ ID NO: 46640 - DNA, 21 bp, Homo sapiens
gagattcctgatgaagtgaag

SEQ ID NO: 46641 - RNA, 21 nt, RNAi
gauuccugaugaagugaaguu

SEQ ID NO: 46642 - RNA, 21 nt, RNAi
uucuaaggacuacuucacuuc

SEQ ID NO: 46643 - DNA, 21 bp, Homo sapiens
gattcctgatgaagtgaagct

SEQ ID NO: 46644 - RNA, 21 nt, RNAi
uuccugaugaagugaagcuuu

SEQ ID NO: 46645 - RNA, 21 nt, RNAi
uuaaggacuacuucacuucga

SEQ ID NO: 46646 - DNA, 21 bp, Homo sapiens
gagtgtcagctgatgtatgtc

SEQ ID NO: 46647 - RNA, 21 nt, RNAi
gugucagcugauguaugucuu

SEQ ID NO: 46648 - RNA, 21 nt, RNAi
uucacagucgacuacauacag

SEQ ID NO: 46649 - DNA, 21 bp, Homo sapiens
gagttctgctttattctctag

SEQ ID NO: 46650 - RNA, 21 nt, RNAi
guucugcuuuauucucuaguu

SEQ ID NO: 46651 - RNA, 21 nt, RNAi
uucaagacgaaauaagagauc

SEQ ID NO: 46652 - DNA, 21 bp, Homo sapiens
gaacaagcaaatgccacagct

SEQ ID NO: 46653 - RNA, 21 nt, RNAi
acaagcaaaugccacagcuuu

SEQ ID NO: 46654 - RNA, 21 nt, RNAi
uuuguucguuuacggugucga

SEQ ID NO: 46655 - DNA, 21 bp, Homo sapiens
gaatctgaaatacactcaggt

SEQ ID NO: 46656 - RNA, 21 nt, RNAi
aucugaaauacacucagguuu

SEQ ID NO: 46657 - RNA, 21 nt, RNAi
uuuagacuuuaugugagucca

SEQ ID NO: 46658 - DNA, 21 bp, Homo sapiens
gaaatacactcaggtggtctt

SEQ ID NO: 46659 - RNA, 21 nt, RNAi
aauacacucagguggucuuuu

SEQ ID NO: 46660 - RNA, 21 nt, RNAi
uuuuaugugaguccaccagaa

SEQ ID NO: 46661 - DNA, 21 bp, Homo sapiens
gaagcctatttctcctttcat

SEQ ID NO: 46662 - RNA, 21 nt, RNAi
agccuauuucuccuuucauuu

SEQ ID NO: 46663 - RNA, 21 nt, RNAi
uuucggauaaagaggaaagua

SEQ ID NO: 46664 - DNA, 21 bp, Homo sapiens
gattatatgcttcttgcagtt

SEQ ID NO: 46665 - RNA, 21 nt, RNAi
uuauaugcuucuugcaguuuu

SEQ ID NO: 46666 - RNA, 21 nt, RNAi
uuaauauacgaagaacgucaa

SEQ ID NO: 46667 - DNA, 21 bp, Homo sapiens
gactgaattaggaatttggat

SEQ ID NO: 46668 - RNA, 21 nt, RNAi
cugaauuaggaauuuggauuu

SEQ ID NO: 46669 - RNA, 21 nt, RNAi
uugacuuaauccuuaaaccua

SEQ ID NO: 46670 - DNA, 21 bp, Homo sapiens
gaattaggaatttggatgctt

SEQ ID NO: 46671 - RNA, 21 nt, RNAi
auuaggaauuuggaugcuuuu

SEQ ID NO: 46672 - RNA, 21 nt, RNAi
uuuaauccuuaaaccuacgaa

SEQ ID NO: 46673 - DNA, 21 bp, Homo sapiens
gaggtgccttgcaaactttca

SEQ ID NO: 46674 - RNA, 21 nt, RNAi
ggugccuugcaaacuuucauu

SEQ ID NO: 46675 - RNA, 21 nt, RNAi
uuccacggaacguuugaaagu

SEQ ID NO: 46676 - DNA, 21 bp, Homo sapiens
gaatgtgcctgaggctgcttt

SEQ ID NO: 46677 - RNA, 21 nt, RNAi
augugccugaggcugcuuuuu

SEQ ID NO: 46678 - RNA, 21 nt, RNAi
uuuacacggacuccgacgaaa

SEQ ID NO: 46679 - DNA, 21 bp, Homo sapiens
gaggctgctttactctggaat

SEQ ID NO: 46680 - RNA, 21 nt, RNAi
ggcugcuuuacucuggaauuu

SEQ ID NO: 46681 - RNA, 21 nt, RNAi
uuccgacgaaaugagaccuua

SEQ ID NO: 46682 - DNA, 21 bp, Homo sapiens
gaccgtttagaatgctatgta

SEQ ID NO: 46683 - RNA, 21 nt, RNAi
ccguuuagaaugcuauguauu

SEQ ID NO: 46684 - RNA, 21 nt, RNAi
uuggcaaaucuuacgauacau

SEQ ID NO: 46685 - DNA, 21 bp, Homo sapiens
gatttggctctccttaagtga

SEQ ID NO: 46686 - RNA, 21 nt, RNAi
uuuggcucuccuuaagugauu

SEQ ID NO: 46687 - RNA, 21 nt, RNAi
uuaaaccgagaggaauucacu

SEQ ID NO: 46688 - DNA, 21 bp, Homo sapiens
gactgtatattatggaactag

SEQ ID NO: 46689 - RNA, 21 nt, RNAi
cuguauauuauggaacuaguu

SEQ ID NO: 46690 - RNA, 21 nt, RNAi
uugacauauaauaccuugauc

SEQ ID NO: 46691 - DNA, 21 bp, Homo sapiens
gaactagtaaaccttaggatt

SEQ ID NO: 46692 - RNA, 21 nt, RNAi
acuaguaaaccuuaggauuuu

SEQ ID NO: 46693 - RNA, 21 nt, RNAi
uuugaucauuuggaauccuaa

SEQ ID NO: 46694 - DNA, 21 bp, Homo sapiens
gagtctaatctttcaaggagg

SEQ ID NO: 46695 - RNA, 21 nt, RNAi
gucuaaucuuucaaggagguu

SEQ ID NO: 46696 - RNA, 21 nt, RNAi
uucagauuagaaaguuccucc

SEQ ID NO: 46697 - DNA, 21 bp, Homo sapiens
gatggtaccattgctctttcc

SEQ ID NO: 46698 - RNA, 21 nt, RNAi
ugguaccauugcucuuuccuu

SEQ ID NO: 46699 - RNA, 21 nt, RNAi
uuaccaugguaacgagaaagg

SEQ ID NO: 46700 - DNA, 21 bp, Homo sapiens
gatatggcagctctttaatgt

SEQ ID NO: 46701 - RNA, 21 nt, RNAi
uauggcagcucuuuaauguuu

SEQ ID NO: 46702 - RNA, 21 nt, RNAi
uuauaccgucgagaaauuaca

SEQ ID NO: 46703 - DNA, 21 bp, Homo sapiens
gagccatttgcatacaattta

SEQ ID NO: 46704 - RNA, 21 nt, RNAi
gccauuugcauacaauuuauu

SEQ ID NO: 46705 - RNA, 21 nt, RNAi
uucgguaaacguauguuaaau

SEQ ID NO: 46706 - DNA, 21 bp, Homo sapiens
gattactcgaagatgactgca

SEQ ID NO: 46707 - RNA, 21 nt, RNAi
uuacucgaagaugacugcauu

SEQ ID NO: 46708 - RNA, 21 nt, RNAi
uuaaugagcuucuacugacgu

SEQ ID NO: 46709 - DNA, 21 bp, Homo sapiens
gaagatgactgcaaaggtaaa

SEQ ID NO: 46710 - RNA, 21 nt, RNAi
agaugacugcaaagguaaauu

SEQ ID NO: 46711 - RNA, 21 nt, RNAi
uuucuacugacguuuccauuu

SEQ ID NO: 46712 - DNA, 21 bp, Homo sapiens
tacgagctgcaggaggttatc

SEQ ID NO: 46713 - RNA, 21 nt, RNAi
cgagcugcaggagguuaucuu

SEQ ID NO: 46714 - RNA, 21 nt, RNAi
uugcucgacguccuccaauag

SEQ ID NO: 46715 - DNA, 21 bp, Homo sapiens
tatcggcagtggagctactgc

SEQ ID NO: 46716 - RNA, 21 nt, RNAi
ucggcaguggagcuacugcuu

SEQ ID NO: 46717 - RNA, 21 nt, RNAi
uuagccgucaccucgaugacg

SEQ ID NO: 46718 - DNA, 21 bp, Homo sapiens
tactgctgtggttcaggcagc

SEQ ID NO: 46719 - RNA, 21 nt, RNAi
cugcugugguucaggcagcuu

SEQ ID NO: 46720 - RNA, 21 nt, RNAi
uugacgacaccaaguccgucg

SEQ ID NO: 46721 - DNA, 21 bp, Homo sapiens
tagtgacctattacacctctt

SEQ ID NO: 46722 - RNA, 21 nt, RNAi
gugaccuauuacaccucuuuu

SEQ ID NO: 46723 - RNA, 21 nt, RNAi
uucacuggauaauguggagaa

SEQ ID NO: 46724 - DNA, 21 bp, Homo sapiens
tactaagtggaggttcaatgt

SEQ ID NO: 46725 - RNA, 21 nt, RNAi
cuaaguggagguucaauguuu

SEQ ID NO: 46726 - RNA, 21 nt, RNAi
uugauucaccuccaaguuaca

SEQ ID NO: 46727 - DNA, 21 bp, Homo sapiens
taagtggaggttcaatgttgg

SEQ ID NO: 46728 - RNA, 21 nt, RNAi
aguggagguucaauguugguu

SEQ ID NO: 46729 - RNA, 21 nt, RNAi
uuucaccuccaaguuacaacc

SEQ ID NO: 46730 - DNA, 21 bp, Homo sapiens
tacattgtcaaccgaggagaa

SEQ ID NO: 46731 - RNA, 21 nt, RNAi
cauugucaaccgaggagaauu

SEQ ID NO: 46732 - RNA, 21 nt, RNAi
uuguaacaguuggcuccucuu

SEQ ID NO: 46733 - DNA, 21 bp, Homo sapiens
tagcaacaattcttaaagagg

SEQ ID NO: 46734 - RNA, 21 nt, RNAi
gcaacaauucuuaaagagguu

SEQ ID NO: 46735 - RNA, 21 nt, RNAi
uucguuguuaagaauuucucc

SEQ ID NO: 46736 - DNA, 21 bp, Homo sapiens
tagactatctacacagaaacg

SEQ ID NO: 46737 - RNA, 21 nt, RNAi
gacuaucuacacagaaacguu

SEQ ID NO: 46738 - RNA, 21 nt, RNAi
uucugauagaugugucuuugc

SEQ ID NO: 46739 - DNA, 21 bp, Homo sapiens
tatctacacagaaacggtcag

SEQ ID NO: 46740 - RNA, 21 nt, RNAi
ucuacacagaaacggucaguu

SEQ ID NO: 46741 - RNA, 21 nt, RNAi
uuagaugugucuuugccaguc

SEQ ID NO: 46742 - DNA, 21 bp, Homo sapiens
tacacagaaacggtcagattc

SEQ ID NO: 46743 - RNA, 21 nt, RNAi
cacagaaacggucagauucuu

SEQ ID NO: 46744 - RNA, 21 nt, RNAi
uugugucuuugccagucuaag

SEQ ID NO: 46745 - DNA, 21 bp, Homo sapiens
taagtgcgttcctagcaacag

SEQ ID NO: 46746 - RNA, 21 nt, RNAi
agugcguuccuagcaacaguu

SEQ ID NO: 46747 - RNA, 21 nt, RNAi
uuucacgcaaggaucguuguc

SEQ ID NO: 46748 - DNA, 21 bp, Homo sapiens
tatgacttcaaggctgacatg

SEQ ID NO: 46749 - RNA, 21 nt, RNAi
ugacuucaaggcugacauguu

SEQ ID NO: 46750 - RNA, 21 nt, RNAi
uuacugaaguuccgacuguac

SEQ ID NO: 46751 - DNA, 21 bp, Homo sapiens
taactgccattgaattagcaa

SEQ ID NO: 46752 - RNA, 21 nt, RNAi
acugccauugaauuagcaauu

SEQ ID NO: 46753 - RNA, 21 nt, RNAi
uuugacgguaacuuaaucguu

SEQ ID NO: 46754 - DNA, 21 bp, Homo sapiens
tagcaacaggagcagcgcctt

SEQ ID NO: 46755 - RNA, 21 nt, RNAi
gcaacaggagcagcgccuuuu

SEQ ID NO: 46756 - RNA, 21 nt, RNAi
uucguuguccucgucgcggaa

SEQ ID NO: 46757 - DNA, 21 bp, Homo sapiens
tactttcactgtgtcttcaga

SEQ ID NO: 46758 - RNA, 21 nt, RNAi
cuuucacugugucuucagauu

SEQ ID NO: 46759 - RNA, 21 nt, RNAi
uugaaagugacacagaagucu

SEQ ID NO: 46760 - DNA, 21 bp, Homo sapiens
tacctgattgagaagctgctt

SEQ ID NO: 46761 - RNA, 21 nt, RNAi
ccugauugagaagcugcuuuu

SEQ ID NO: 46762 - RNA, 21 nt, RNAi
uuggacuaacucuucgacgaa

SEQ ID NO: 46763 - DNA, 21 bp, Homo sapiens
tacaagaacaccagacatagc

SEQ ID NO: 46764 - RNA, 21 nt, RNAi
caagaacaccagacauagcuu

SEQ ID NO: 46765 - RNA, 21 nt, RNAi
uuguucuuguggucuguaucg

SEQ ID NO: 46766 - DNA, 21 bp, Homo sapiens
taatgaagactacagagaagc

SEQ ID NO: 46767 - RNA, 21 nt, RNAi
augaagacuacagagaagcuu

SEQ ID NO: 46768 - RNA, 21 nt, RNAi
uuuacuucugaugucucuucg

SEQ ID NO: 46769 - DNA, 21 bp, Homo sapiens
tacagagaagcttcttcttgt

SEQ ID NO: 46770 - RNA, 21 nt, RNAi
cagagaagcuucuucuuguuu

SEQ ID NO: 46771 - RNA, 21 nt, RNAi
uugucucuucgaagaagaaca

SEQ ID NO: 46772 - DNA, 21 bp, Homo sapiens
taagaaactccagaaaggaac

SEQ ID NO: 46773 - RNA, 21 nt, RNAi
agaaacuccagaaaggaacuu

SEQ ID NO: 46774 - RNA, 21 nt, RNAi
uuucuuugaggucuuuccuug

SEQ ID NO: 46775 - DNA, 21 bp, Homo sapiens
tacgatttgagtttactccag

SEQ ID NO: 46776 - RNA, 21 nt, RNAi
cgauuugaguuuacuccaguu

SEQ ID NO: 46777 - RNA, 21 nt, RNAi
uugcuaaacucaaaugagguc

SEQ ID NO: 46778 - DNA, 21 bp, Homo sapiens
tactccaggaagagatacagc

SEQ ID NO: 46779 - RNA, 21 nt, RNAi
cuccaggaagagauacagcuu

SEQ ID NO: 46780 - RNA, 21 nt, RNAi
uugagguccuucucuaugucg

SEQ ID NO: 46781 - DNA, 21 bp, Homo sapiens
tacagcagatggtgtatctca

SEQ ID NO: 46782 - RNA, 21 nt, RNAi
cagcagaugguguaucucauu

SEQ ID NO: 46783 - RNA, 21 nt, RNAi
uugucgucuaccacauagagu

SEQ ID NO: 46784 - DNA, 21 bp, Homo sapiens
tatctcaggagctcttctctg

SEQ ID NO: 46785 - RNA, 21 nt, RNAi
ucucaggagcucuucucuguu

SEQ ID NO: 46786 - RNA, 21 nt, RNAi
uuagaguccucgagaagagac

SEQ ID NO: 46787 - DNA, 21 bp, Homo sapiens
tagttatagtggctgctaatt

SEQ ID NO: 46788 - RNA, 21 nt, RNAi
guuauaguggcugcuaauuuu

SEQ ID NO: 46789 - RNA, 21 nt, RNAi
uucaauaucaccgacgauuaa

SEQ ID NO: 46790 - DNA, 21 bp, Homo sapiens
tatagtggctgctaatttaca

SEQ ID NO: 46791 - RNA, 21 nt, RNAi
uaguggcugcuaauuuacauu

SEQ ID NO: 46792 - RNA, 21 nt, RNAi
uuaucaccgacgauuaaaugu

SEQ ID NO: 46793 - DNA, 21 bp, Homo sapiens
tagtggctgctaatttacaga

SEQ ID NO: 46794 - RNA, 21 nt, RNAi
guggcugcuaauuuacagauu

SEQ ID NO: 46795 - RNA, 21 nt, RNAi
uucaccgacgauuaaaugucu

SEQ ID NO: 46796 - DNA, 21 bp, Homo sapiens
tacagaagattgtagatgatc

SEQ ID NO: 46797 - RNA, 21 nt, RNAi
cagaagauuguagaugaucuu

SEQ ID NO: 46798 - RNA, 21 nt, RNAi
uugucuucuaacaucuacuag

SEQ ID NO: 46799 - DNA, 21 bp, Homo sapiens
taagttggcttctggctgtga

SEQ ID NO: 46800 - RNA, 21 nt, RNAi
aguuggcuucuggcugugauu

SEQ ID NO: 46801 - RNA, 21 nt, RNAi
uuucaaccgaagaccgacacu

SEQ ID NO: 46802 - DNA, 21 bp, Homo sapiens
tacaacactccgagttctgct

SEQ ID NO: 46803 - RNA, 21 nt, RNAi
caacacuccgaguucugcuuu

SEQ ID NO: 46804 - RNA, 21 nt, RNAi
uuguugugaggcucaagacga

SEQ ID NO: 46805 - DNA, 21 bp, Homo sapiens
tattctctagcaatccacagt

SEQ ID NO: 46806 - RNA, 21 nt, RNAi
uucucuagcaauccacaguuu

SEQ ID NO: 46807 - RNA, 21 nt, RNAi
uuaagagaucguuagguguca

SEQ ID NO: 46808 - DNA, 21 bp, Homo sapiens
tagcaatccacagtacaagaa

SEQ ID NO: 46809 - RNA, 21 nt, RNAi
gcaauccacaguacaagaauu

SEQ ID NO: 46810 - RNA, 21 nt, RNAi
uucguuaggugucauguucuu

SEQ ID NO: 46811 - DNA, 21 bp, Homo sapiens
tacaagaacaagcaaatgcca

SEQ ID NO: 46812 - RNA, 21 nt, RNAi
caagaacaagcaaaugccauu

SEQ ID NO: 46813 - RNA, 21 nt, RNAi
uuguucuuguucguuuacggu

SEQ ID NO: 46814 - DNA, 21 bp, Homo sapiens
tagcaatcaatttggatatcc

SEQ ID NO: 46815 - RNA, 21 nt, RNAi
gcaaucaauuuggauauccuu

SEQ ID NO: 46816 - RNA, 21 nt, RNAi
uucguuaguuaaaccuauagg

SEQ ID NO: 46817 - DNA, 21 bp, Homo sapiens
tacactcaggtggtcttattt

SEQ ID NO: 46818 - RNA, 21 nt, RNAi
cacucagguggucuuauuuuu

SEQ ID NO: 46819 - RNA, 21 nt, RNAi
uugugaguccaccagaauaaa

SEQ ID NO: 46820 - DNA, 21 bp, Homo sapiens
tatccagaagcctatttctcc

SEQ ID NO: 46821 - RNA, 21 nt, RNAi
uccagaagccuauuucuccuu

SEQ ID NO: 46822 - RNA, 21 nt, RNAi
uuaggucuucggauaaagagg

SEQ ID NO: 46823 - DNA, 21 bp, Homo sapiens
tacatctgacaatactgcctc

SEQ ID NO: 46824 - RNA, 21 nt, RNAi
caucugacaauacugccucuu

SEQ ID NO: 46825 - RNA, 21 nt, RNAi
uuguagacuguuaugacggag

SEQ ID NO: 46826 - DNA, 21 bp, Homo sapiens
tagccaaacttgaattctagt

SEQ ID NO: 46827 - RNA, 21 nt, RNAi
gccaaacuugaauucuaguuu

SEQ ID NO: 46828 - RNA, 21 nt, RNAi
uucgguuugaacuuaagauca

SEQ ID NO: 46829 - DNA, 21 bp, Homo sapiens
tatgcattacacaccttagct

SEQ ID NO: 46830 - RNA, 21 nt, RNAi
ugcauuacacaccuuagcuuu

SEQ ID NO: 46831 - RNA, 21 nt, RNAi
uuacguaauguguggaaucga

SEQ ID NO: 46832 - DNA, 21 bp, Homo sapiens
tacacaccttagctataagaa

SEQ ID NO: 46833 - RNA, 21 nt, RNAi
cacaccuuagcuauaagaauu

SEQ ID NO: 46834 - RNA, 21 nt, RNAi
uuguguggaaucgauauucuu

SEQ ID NO: 46835 - DNA, 21 bp, Homo sapiens
tatgcttcttgcagttaatct

SEQ ID NO: 46836 - RNA, 21 nt, RNAi
ugcuucuugcaguuaaucuuu

SEQ ID NO: 46837 - RNA, 21 nt, RNAi
uuacgaagaacgucaauuaga

SEQ ID NO: 46838 - DNA, 21 bp, Homo sapiens
taggaatttggatgcttattc

SEQ ID NO: 46839 - RNA, 21 nt, RNAi
ggaauuuggaugcuuauucuu

SEQ ID NO: 46840 - RNA, 21 nt, RNAi
uuccuuaaaccuacgaauaag

SEQ ID NO: 46841 - DNA, 21 bp, Homo sapiens
tacaatctgactgtctcttgg

SEQ ID NO: 46842 - RNA, 21 nt, RNAi
caaucugacugucucuugguu

SEQ ID NO: 46843 - RNA, 21 nt, RNAi
uuguuagacugacagagaacc

SEQ ID NO: 46844 - DNA, 21 bp, Homo sapiens
taagaatgtgcctgaggctgc

SEQ ID NO: 46845 - RNA, 21 nt, RNAi
agaaugugccugaggcugcuu

SEQ ID NO: 46846 - RNA, 21 nt, RNAi
uuucuuacacggacuccgacg

SEQ ID NO: 46847 - DNA, 21 bp, Homo sapiens
tactctggaatagtctcagat

SEQ ID NO: 46848 - RNA, 21 nt, RNAi
cucuggaauagucucagauuu

SEQ ID NO: 46849 - RNA, 21 nt, RNAi
uugagaccuuaucagagucua

SEQ ID NO: 46850 - DNA, 21 bp, Homo sapiens
tataaggtggcatatgttaag

SEQ ID NO: 46851 - RNA, 21 nt, RNAi
uaagguggcauauguuaaguu

SEQ ID NO: 46852 - RNA, 21 nt, RNAi
uuauuccaccguauacaauuc

SEQ ID NO: 46853 - DNA, 21 bp, Homo sapiens
taaggtggcatatgttaagtt

SEQ ID NO: 46854 - RNA, 21 nt, RNAi
agguggcauauguuaaguuuu

SEQ ID NO: 46855 - RNA, 21 nt, RNAi
uuuccaccguauacaauucaa

SEQ ID NO: 46856 - DNA, 21 bp, Homo sapiens
tatggaactagtaaaccttag

SEQ ID NO: 46857 - RNA, 21 nt, RNAi
uggaacuaguaaaccuuaguu

SEQ ID NO: 46858 - RNA, 21 nt, RNAi
uuaccuugaucauuuggaauc

SEQ ID NO: 46859 - DNA, 21 bp, Homo sapiens
taccattgctctttcctagct

SEQ ID NO: 46860 - RNA, 21 nt, RNAi
ccauugcucuuuccuagcuuu

SEQ ID NO: 46861 - RNA, 21 nt, RNAi
uugguaacgagaaaggaucga

SEQ ID NO: 46862 - DNA, 21 bp, Homo sapiens
tagatatggcagctctttaat

SEQ ID NO: 46863 - RNA, 21 nt, RNAi
gauauggcagcucuuuaauuu

SEQ ID NO: 46864 - RNA, 21 nt, RNAi
uucuauaccgucgagaaauua

SEQ ID NO: 46865 - DNA, 21 bp, Homo sapiens
tatggcagctctttaatgtac

SEQ ID NO: 46866 - RNA, 21 nt, RNAi
uggcagcucuuuaauguacuu

SEQ ID NO: 46867 - RNA, 21 nt, RNAi
uuaccgucgagaaauuacaug

SEQ ID NO: 46868 - DNA, 21 bp, Homo sapiens
taaggtgttctagagccattt

SEQ ID NO: 46869 - RNA, 21 nt, RNAi
agguguucuagagccauuuuu

SEQ ID NO: 46870 - RNA, 21 nt, RNAi
uuuccacaagaucucgguaaa

SEQ ID NO: 46871 - DNA, 21 bp, Homo sapiens
tagagccatttgcatacaatt

SEQ ID NO: 46872 - RNA, 21 nt, RNAi
gagccauuugcauacaauuuu

SEQ ID NO: 46873 - RNA, 21 nt, RNAi
uucucgguaaacguauguuaa

SEQ ID NO: 46874 - DNA, 21 bp, Homo sapiens
tacacaacgattactcgaaga

SEQ ID NO: 46875 - RNA, 21 nt, RNAi
cacaacgauuacucgaagauu

SEQ ID NO: 46876 - RNA, 21 nt, RNAi
uuguguugcuaaugagcuucu

SEQ ID NO: 46877 - DNA, 21 bp, Homo sapiens
tactcgaagatgactgcaaag

SEQ ID NO: 46878 - RNA, 21 nt, RNAi
cucgaagaugacugcaaaguu

SEQ ID NO: 46879 - RNA, 21 nt, RNAi
uugagcuucuacugacguuuc

SEQ ID NO: 46880 - DNA, 21 bp, Homo sapiens
aaatgccagaccagtatggat

SEQ ID NO: 46881 - RNA, 21 nt, RNAi
augccagaccaguauggauuu

SEQ ID NO: 46882 - RNA, 21 nt, RNAi
uuuacggucuggucauaccua

SEQ ID NO: 46883 - DNA, 21 bp, Homo sapiens
aatgccagaccagtatggatg

SEQ ID NO: 46884 - RNA, 21 nt, RNAi
ugccagaccaguauggauguu

SEQ ID NO: 46885 - RNA, 21 nt, RNAi
uuacggucuggucauaccuac

SEQ ID NO: 46886 - DNA, 21 bp, Homo sapiens
aacgtagtgacctattacacc

SEQ ID NO: 46887 - RNA, 21 nt, RNAi
cguagugaccuauuacaccuu

SEQ ID NO: 46888 - RNA, 21 nt, RNAi
uugcaucacuggauaaugugg

SEQ ID NO: 46889 - DNA, 21 bp, Homo sapiens
aactttggctggtcatgaaat

SEQ ID NO: 46890 - RNA, 21 nt, RNAi
cuuuggcuggucaugaaauuu

SEQ ID NO: 46891 - RNA, 21 nt, RNAi
uugaaaccgaccaguacuuua

SEQ ID NO: 46892 - DNA, 21 bp, Homo sapiens
aaattactaagtggaggttca

SEQ ID NO: 46893 - RNA, 21 nt, RNAi
auuacuaaguggagguucauu

SEQ ID NO: 46894 - RNA, 21 nt, RNAi
uuuaaugauucaccuccaagu

SEQ ID NO: 46895 - DNA, 21 bp, Homo sapiens
aattactaagtggaggttcaa

SEQ ID NO: 46896 - RNA, 21 nt, RNAi
uuacuaaguggagguucaauu

SEQ ID NO: 46897 - RNA, 21 nt, RNAi
uuaaugauucaccuccaaguu

SEQ ID NO: 46898 - DNA, 21 bp, Homo sapiens
aagtggaggttcaatgttgga

SEQ ID NO: 46899 - RNA, 21 nt, RNAi
guggagguucaauguuggauu

SEQ ID NO: 46900 - RNA, 21 nt, RNAi
uucaccuccaaguuacaaccu

SEQ ID NO: 46901 - DNA, 21 bp, Homo sapiens
aaggcttagactatctacaca

SEQ ID NO: 46902 - RNA, 21 nt, RNAi
ggcuuagacuaucuacacauu

SEQ ID NO: 46903 - RNA, 21 nt, RNAi
uuccgaaucugauagaugugu

SEQ ID NO: 46904 - DNA, 21 bp, Homo sapiens
aaagctggtaatattcttctg

SEQ ID NO: 46905 - RNA, 21 nt, RNAi
agcugguaauauucuucuguu

SEQ ID NO: 46906 - RNA, 21 nt, RNAi
uuucgaccauuauaagaagac

SEQ ID NO: 46907 - DNA, 21 bp, Homo sapiens
aagctggtaatattcttctgg

SEQ ID NO: 46908 - RNA, 21 nt, RNAi
gcugguaauauucuucugguu

SEQ ID NO: 46909 - RNA, 21 nt, RNAi
uucgaccauuauaagaagacc

SEQ ID NO: 46910 - DNA, 21 bp, Homo sapiens
aaagtacggcaagtcctttag

SEQ ID NO: 46911 - RNA, 21 nt, RNAi
aguacggcaaguccuuuaguu

SEQ ID NO: 46912 - RNA, 21 nt, RNAi
uuucaugccguucaggaaauc

SEQ ID NO: 46913 - DNA, 21 bp, Homo sapiens
aagtacggcaagtcctttaga

SEQ ID NO: 46914 - RNA, 21 nt, RNAi
guacggcaaguccuuuagauu

SEQ ID NO: 46915 - RNA, 21 nt, RNAi
uucaugccguucaggaaaucu

SEQ ID NO: 46916 - DNA, 21 bp, Homo sapiens
caggcaagaacgtgtagcaat

SEQ ID NO: 46917 - RNA, 21 nt, RNAi
ggcaagaacguguagcaauuu

SEQ ID NO: 46918 - RNA, 21 nt, RNAi
uuccguucuugcacaucguua

SEQ ID NO: 46919 - DNA, 21 bp, Homo sapiens
cagaccagtatggatgaacta

SEQ ID NO: 46920 - RNA, 21 nt, RNAi
gaccaguauggaugaacuauu

SEQ ID NO: 46921 - RNA, 21 nt, RNAi
uucuggucauaccuacuugau

SEQ ID NO: 46922 - DNA, 21 bp, Homo sapiens
caacgtagtgacctattacac

SEQ ID NO: 46923 - RNA, 21 nt, RNAi
acguagugaccuauuacacuu

SEQ ID NO: 46924 - RNA, 21 nt, RNAi
uuugcaucacuggauaaugug

SEQ ID NO: 46925 - DNA, 21 bp, Homo sapiens
catgaaattactaagtggagg

SEQ ID NO: 46926 - RNA, 21 nt, RNAi
ugaaauuacuaaguggagguu

SEQ ID NO: 46927 - RNA, 21 nt, RNAi
uuacuuuaaugauucaccucc

SEQ ID NO: 46928 - DNA, 21 bp, Homo sapiens
cattgtcaaccgaggagaaca

SEQ ID NO: 46929 - RNA, 21 nt, RNAi
uugucaaccgaggagaacauu

SEQ ID NO: 46930 - RNA, 21 nt, RNAi
uuaacaguuggcuccucuugu

SEQ ID NO: 46931 - DNA, 21 bp, Homo sapiens
cagaaacggtcagattcacag

SEQ ID NO: 46932 - RNA, 21 nt, RNAi
gaaacggucagauucacaguu

SEQ ID NO: 46933 - RNA, 21 nt, RNAi
uucuuugccagucuaaguguc

SEQ ID NO: 46934 - DNA, 21 bp, Homo sapiens
cagcgccttatcacaaatatc

SEQ ID NO: 46935 - RNA, 21 nt, RNAi
gcgccuuaucacaaauaucuu

SEQ ID NO: 46936 - RNA, 21 nt, RNAi
uucgcggaauaguguuuauag

SEQ ID NO: 46937 - DNA, 21 bp, Homo sapiens
caatgctaatgaagactacag

SEQ ID NO: 46938 - RNA, 21 nt, RNAi
augcuaaugaagacuacaguu

SEQ ID NO: 46939 - RNA, 21 nt, RNAi
uuuacgauuacuucugauguc

SEQ ID NO: 46940 - DNA, 21 bp, Homo sapiens
cagcagatggtgtatctcagg

SEQ ID NO: 46941 - RNA, 21 nt, RNAi
gcagaugguguaucucagguu

SEQ ID NO: 46942 - RNA, 21 nt, RNAi
uucgucuaccacauagagucc

SEQ ID NO: 46943 - DNA, 21 bp, Homo sapiens
cagatggtgtatctcaggagc

SEQ ID NO: 46944 - RNA, 21 nt, RNAi
gaugguguaucucaggagcuu

SEQ ID NO: 46945 - RNA, 21 nt, RNAi
uucuaccacauagaguccucg

SEQ ID NO: 46946 - DNA, 21 bp, Homo sapiens
cacgatgtagttatagtggct

SEQ ID NO: 46947 - RNA, 21 nt, RNAi
cgauguaguuauaguggcuuu

SEQ ID NO: 46948 - RNA, 21 nt, RNAi
uugcuacaucaauaucaccga

SEQ ID NO: 46949 - DNA, 21 bp, Homo sapiens
gaccagtatggatgaactatt

SEQ ID NO: 46950 - RNA, 21 nt, RNAi
ccaguauggaugaacuauuuu

SEQ ID NO: 46951 - RNA, 21 nt, RNAi
uuggucauaccuacuugauaa

SEQ ID NO: 46952 - DNA, 21 bp, Homo sapiens
gaactttggctggtcatgaaa

SEQ ID NO: 46953 - RNA, 21 nt, RNAi
acuuuggcuggucaugaaauu

SEQ ID NO: 46954 - RNA, 21 nt, RNAi
uuugaaaccgaccaguacuuu

SEQ ID NO: 46955 - DNA, 21 bp, Homo sapiens
gaaattactaagtggaggttc

SEQ ID NO: 46956 - RNA, 21 nt, RNAi
aauuacuaaguggagguucuu

SEQ ID NO: 46957 - RNA, 21 nt, RNAi
uuuuaaugauucaccuccaag

SEQ ID NO: 46958 - DNA, 21 bp, Homo sapiens
gaggttcaatgttggatatca

SEQ ID NO: 46959 - RNA, 21 nt, RNAi
gguucaauguuggauaucauu

SEQ ID NO: 46960 - RNA, 21 nt, RNAi
uuccaaguuacaaccuauagu

SEQ ID NO: 46961 - DNA, 21 bp, Homo sapiens
gaaggcttagactatctacac

SEQ ID NO: 46962 - RNA, 21 nt, RNAi
aggcuuagacuaucuacacuu

SEQ ID NO: 46963 - RNA, 21 nt, RNAi
uuuccgaaucugauagaugug

SEQ ID NO: 46964 - DNA, 21 bp, Homo sapiens
gactatctacacagaaacggt

SEQ ID NO: 46965 - RNA, 21 nt, RNAi
cuaucuacacagaaacgguuu

SEQ ID NO: 46966 - RNA, 21 nt, RNAi
uugauagaugugucuuugcca

SEQ ID NO: 46967 - DNA, 21 bp, Homo sapiens
gaggatggttcagtacaaata

SEQ ID NO: 46968 - RNA, 21 nt, RNAi
ggaugguucaguacaaauauu

SEQ ID NO: 46969 - RNA, 21 nt, RNAi
uuccuaccaagucauguuuau

SEQ ID NO: 46970 - DNA, 21 bp, Homo sapiens
gagcagcgccttatcacaaat

SEQ ID NO: 46971 - RNA, 21 nt, RNAi
gcagcgccuuaucacaaauuu

SEQ ID NO: 46972 - RNA, 21 nt, RNAi
uucgucgcggaauaguguuua

SEQ ID NO: 46973 - DNA, 21 bp, Homo sapiens
gagaagctgcttacaagaaca

SEQ ID NO: 46974 - RNA, 21 nt, RNAi
gaagcugcuuacaagaacauu

SEQ ID NO: 46975 - RNA, 21 nt, RNAi
uucuucgacgaauguucuugu

SEQ ID NO: 46976 - DNA, 21 bp, Homo sapiens
gagtgacgacgagatggatga

SEQ ID NO: 46977 - RNA, 21 nt, RNAi
gugacgacgagauggaugauu

SEQ ID NO: 46978 - RNA, 21 nt, RNAi
uucacugcugcucuaccuacu

SEQ ID NO: 46979 - DNA, 21 bp, Homo sapiens
gatacagcagatggtgtatct

SEQ ID NO: 46980 - RNA, 21 nt, RNAi
uacagcagaugguguaucuuu

SEQ ID NO: 46981 - RNA, 21 nt, RNAi
uuaugucgucuaccacauaga

SEQ ID NO: 46982 - DNA, 21 bp, Homo sapiens
tactaagtggaggttcaatgt

SEQ ID NO: 46983 - RNA, 21 nt, RNAi
cuaaguggagguucaauguuu

SEQ ID NO: 46984 - RNA, 21 nt, RNAi
uugauucaccuccaaguuaca

SEQ ID NO: 46985 - DNA, 21 bp, Homo sapiens
taagtggaggttcaatgttgg

SEQ ID NO: 46986 - RNA, 21 nt, RNAi
aguggagguucaauguugguu

SEQ ID NO: 46987 - RNA, 21 nt, RNAi
uuucaccuccaaguuacaacc

SEQ ID NO: 46988 - DNA, 21 bp, Homo sapiens
tagactatctacacagaaacg

SEQ ID NO: 46989 - RNA, 21 nt, RNAi
gacuaucuacacagaaacguu

SEQ ID NO: 46990 - RNA, 21 nt, RNAi
uucugauagaugugucuuugc

SEQ ID NO: 46991 - DNA, 21 bp, Homo sapiens
taagtgcgttcctagcaacag

SEQ ID NO: 46992 - RNA, 21 nt, RNAi
agugcguuccuagcaacaguu

SEQ ID NO: 46993 - RNA, 21 nt, RNAi
uuucacgcaaggaucguuguc

SEQ ID NO: 46994 - DNA, 21 bp, Homo sapiens
tagttatagtggctgctaatt

SEQ ID NO: 46995 - RNA, 21 nt, RNAi
guuauaguggcugcuaauuuu

SEQ ID NO: 46996 - RNA, 21 nt, RNAi
uucaauaucaccgacgauuaa

SEQ ID NO: 46997 - DNA, 21 bp, Homo sapiens
tacagaagattgtagatgatc

SEQ ID NO: 46998 - RNA, 21 nt, RNAi
cagaagauuguagaugaucuu

SEQ ID NO: 46999 - RNA, 21 nt, RNAi
uugucuucuaacaucuacuag

SEQ ID NO: 47000 - DNA, 21 bp, Homo sapiens
aaatggaatccgaggatttaa

SEQ ID NO: 47001 - RNA, 21 nt, RNAi
auggaauccgaggauuuaauu

SEQ ID NO: 47002 - RNA, 21 nt, RNAi
uuuaccuuaggcuccuaaauu

SEQ ID NO: 47003 - DNA, 21 bp, Homo sapiens
aatggaatccgaggatttaag

SEQ ID NO: 47004 - RNA, 21 nt, RNAi
uggaauccgaggauuuaaguu

SEQ ID NO: 47005 - RNA, 21 nt, RNAi
uuaccuuaggcuccuaaauuc

SEQ ID NO: 47006 - DNA, 21 bp, Homo sapiens
aatccgaggatttaagtggca

SEQ ID NO: 47007 - RNA, 21 nt, RNAi
uccgaggauuuaaguggcauu

SEQ ID NO: 47008 - RNA, 21 nt, RNAi
uuaggcuccuaaauucaccgu

SEQ ID NO: 47009 - DNA, 21 bp, Homo sapiens
aagtggcagagaattgacaat

SEQ ID NO: 47010 - RNA, 21 nt, RNAi
guggcagagaauugacaauuu

SEQ ID NO: 47011 - RNA, 21 nt, RNAi
uucaccgucucuuaacuguua

SEQ ID NO: 47012 - DNA, 21 bp, Homo sapiens
aatgaacaaagtgagagacat

SEQ ID NO: 47013 - RNA, 21 nt, RNAi
ugaacaaagugagagacauuu

SEQ ID NO: 47014 - RNA, 21 nt, RNAi
uuacuuguuucacucucugua

SEQ ID NO: 47015 - DNA, 21 bp, Homo sapiens
aaatgaagaccttactgatga

SEQ ID NO: 47016 - RNA, 21 nt, RNAi
augaagaccuuacugaugauu

SEQ ID NO: 47017 - RNA, 21 nt, RNAi
uuuacuucuggaaugacuacu

SEQ ID NO: 47018 - DNA, 21 bp, Homo sapiens
aatgaagaccttactgatgaa

SEQ ID NO: 47019 - RNA, 21 nt, RNAi
ugaagaccuuacugaugaauu

SEQ ID NO: 47020 - RNA, 21 nt, RNAi
uuacuucuggaaugacuacuu

SEQ ID NO: 47021 - DNA, 21 bp, Homo sapiens
aagaccttactgatgaactaa

SEQ ID NO: 47022 - RNA, 21 nt, RNAi
gaccuuacugaugaacuaauu

SEQ ID NO: 47023 - RNA, 21 nt, RNAi
uucuggaaugacuacuugauu

SEQ ID NO: 47024 - DNA, 21 bp, Homo sapiens
aaatttctgctgatactacag

SEQ ID NO: 47025 - RNA, 21 nt, RNAi
auuucugcugauacuacaguu

SEQ ID NO: 47026 - RNA, 21 nt, RNAi
uuuaaagacgacuaugauguc

SEQ ID NO: 47027 - DNA, 21 bp, Homo sapiens
aatttctgctgatactacaga

SEQ ID NO: 47028 - RNA, 21 nt, RNAi
uuucugcugauacuacagauu

SEQ ID NO: 47029 - RNA, 21 nt, RNAi
uuaaagacgacuaugaugucu

SEQ ID NO: 47030 - DNA, 21 bp, Homo sapiens
aaccaaattatgatgatggca

SEQ ID NO: 47031 - RNA, 21 nt, RNAi
ccaaauuaugaugauggcauu

SEQ ID NO: 47032 - RNA, 21 nt, RNAi
uugguuuaauacuacuaccgu

SEQ ID NO: 47033 - DNA, 21 bp, Homo sapiens
aaacagtgttccgctaagtga

SEQ ID NO: 47034 - RNA, 21 nt, RNAi
acaguguuccgcuaagugauu

SEQ ID NO: 47035 - RNA, 21 nt, RNAi
uuugucacaaggcgauucacu

SEQ ID NO: 47036 - DNA, 21 bp, Homo sapiens
aacagtgttccgctaagtgat

SEQ ID NO: 47037 - RNA, 21 nt, RNAi
caguguuccgcuaagugauuu

SEQ ID NO: 47038 - RNA, 21 nt, RNAi
uugucacaaggcgauucacua

SEQ ID NO: 47039 - DNA, 21 bp, Homo sapiens
aaattgattggtcgttacagt

SEQ ID NO: 47040 - RNA, 21 nt, RNAi
auugauuggucguuacaguuu

SEQ ID NO: 47041 - RNA, 21 nt, RNAi
uuuaacuaaccagcaauguca

SEQ ID NO: 47042 - DNA, 21 bp, Homo sapiens
aattgattggtcgttacagtc

SEQ ID NO: 47043 - RNA, 21 nt, RNAi
uugauuggucguuacagucuu

SEQ ID NO: 47044 - RNA, 21 nt, RNAi
uuaacuaaccagcaaugucag

SEQ ID NO: 47045 - DNA, 21 bp, Homo sapiens
aattcaagtgagatttgctga

SEQ ID NO: 47046 - RNA, 21 nt, RNAi
uucaagugagauuugcugauu

SEQ ID NO: 47047 - RNA, 21 nt, RNAi
uuaaguucacucuaaacgacu

SEQ ID NO: 47048 - DNA, 21 bp, Homo sapiens
aaagctattcaagagccagat

SEQ ID NO: 47049 - RNA, 21 nt, RNAi
agcuauucaagagccagauuu

SEQ ID NO: 47050 - RNA, 21 nt, RNAi
uuucgauaaguucucggucua

SEQ ID NO: 47051 - DNA, 21 bp, Homo sapiens
aagctattcaagagccagatg

SEQ ID NO: 47052 - RNA, 21 nt, RNAi
gcuauucaagagccagauguu

SEQ ID NO: 47053 - RNA, 21 nt, RNAi
uucgauaaguucucggucuac

SEQ ID NO: 47054 - DNA, 21 bp, Homo sapiens
aagagccagatgatgcacgtg

SEQ ID NO: 47055 - RNA, 21 nt, RNAi
gagccagaugaugcacguguu

SEQ ID NO: 47056 - RNA, 21 nt, RNAi
uucucggucuacuacgugcac

SEQ ID NO: 47057 - DNA, 21 bp, Homo sapiens
aaatggccagagcaaactgca

SEQ ID NO: 47058 - RNA, 21 nt, RNAi
auggccagagcaaacugcauu

SEQ ID NO: 47059 - RNA, 21 nt, RNAi
uuuaccggucucguuugacgu

SEQ ID NO: 47060 - DNA, 21 bp, Homo sapiens
aatggccagagcaaactgcaa

SEQ ID NO: 47061 - RNA, 21 nt, RNAi
uggccagagcaaacugcaauu

SEQ ID NO: 47062 - RNA, 21 nt, RNAi
uuaccggucucguuugacguu

SEQ ID NO: 47063 - DNA, 21 bp, Homo sapiens
aatttgaactgtcacaaggta

SEQ ID NO: 47064 - RNA, 21 nt, RNAi
uuugaacugucacaagguauu

SEQ ID NO: 47065 - RNA, 21 nt, RNAi
uuaaacuugacaguguuccau

SEQ ID NO: 47066 - DNA, 21 bp, Homo sapiens
aactgtcacaaggtaatgtca

SEQ ID NO: 47067 - RNA, 21 nt, RNAi
cugucacaagguaaugucauu

SEQ ID NO: 47068 - RNA, 21 nt, RNAi
uugacaguguuccauuacagu

SEQ ID NO: 47069 - DNA, 21 bp, Homo sapiens
aaagctgtagaacgtggagca

SEQ ID NO: 47070 - RNA, 21 nt, RNAi
agcuguagaacguggagcauu

SEQ ID NO: 47071 - RNA, 21 nt, RNAi
uuucgacaucuugcaccucgu

SEQ ID NO: 47072 - DNA, 21 bp, Homo sapiens
aagctgtagaacgtggagcag

SEQ ID NO: 47073 - RNA, 21 nt, RNAi
gcuguagaacguggagcaguu

SEQ ID NO: 47074 - RNA, 21 nt, RNAi
uucgacaucuugcaccucguc

SEQ ID NO: 47075 - DNA, 21 bp, Homo sapiens
aacgtggagcagtaccactag

SEQ ID NO: 47076 - RNA, 21 nt, RNAi
cguggagcaguaccacuaguu

SEQ ID NO: 47077 - RNA, 21 nt, RNAi
uugcaccucgucauggugauc

SEQ ID NO: 47078 - DNA, 21 bp, Homo sapiens
aaagcagctgctttcagagga

SEQ ID NO: 47079 - RNA, 21 nt, RNAi
agcagcugcuuucagaggauu

SEQ ID NO: 47080 - RNA, 21 nt, RNAi
uuucgucgacgaaagucuccu

SEQ ID NO: 47081 - DNA, 21 bp, Homo sapiens
aagcagctgctttcagaggag

SEQ ID NO: 47082 - RNA, 21 nt, RNAi
gcagcugcuuucagaggaguu

SEQ ID NO: 47083 - RNA, 21 nt, RNAi
uucgucgacgaaagucuccuc

SEQ ID NO: 47084 - DNA, 21 bp, Homo sapiens
aagaatttatcagcatctacg

SEQ ID NO: 47085 - RNA, 21 nt, RNAi
gaauuuaucagcaucuacguu

SEQ ID NO: 47086 - RNA, 21 nt, RNAi
uucuuaaauagucguagaugc

SEQ ID NO: 47087 - DNA, 21 bp, Homo sapiens
aatttatcagcatctacggta

SEQ ID NO: 47088 - RNA, 21 nt, RNAi
uuuaucagcaucuacgguauu

SEQ ID NO: 47089 - RNA, 21 nt, RNAi
uuaaauagucguagaugccau

SEQ ID NO: 47090 - DNA, 21 bp, Homo sapiens
aataggaacaacagttgtgat

SEQ ID NO: 47091 - RNA, 21 nt, RNAi
uaggaacaacaguugugauuu

SEQ ID NO: 47092 - RNA, 21 nt, RNAi
uuauccuuguugucaacacua

SEQ ID NO: 47093 - DNA, 21 bp, Homo sapiens
aacaacagttgtgattccaga

SEQ ID NO: 47094 - RNA, 21 nt, RNAi
caacaguugugauuccagauu

SEQ ID NO: 47095 - RNA, 21 nt, RNAi
uuguugucaacacuaaggucu

SEQ ID NO: 47096 - DNA, 21 bp, Homo sapiens
aacagttgtgattccagagga

SEQ ID NO: 47097 - RNA, 21 nt, RNAi
caguugugauuccagaggauu

SEQ ID NO: 47098 - RNA, 21 nt, RNAi
uugucaacacuaaggucuccu

SEQ ID NO: 47099 - DNA, 21 bp, Homo sapiens
aacatgccaccacaagatgca

SEQ ID NO: 47100 - RNA, 21 nt, RNAi
caugccaccacaagaugcauu

SEQ ID NO: 47101 - RNA, 21 nt, RNAi
uuguacggugguguucuacgu

SEQ ID NO: 47102 - DNA, 21 bp, Homo sapiens
aagatgcagaaataggttacc

SEQ ID NO: 47103 - RNA, 21 nt, RNAi
gaugcagaaauagguuaccuu

SEQ ID NO: 47104 - RNA, 21 nt, RNAi
uucuacgucuuuauccaaugg

SEQ ID NO: 47105 - DNA, 21 bp, Homo sapiens
aaataggttaccggaattcat

SEQ ID NO: 47106 - RNA, 21 nt, RNAi
auagguuaccggaauucauuu

SEQ ID NO: 47107 - RNA, 21 nt, RNAi
uuuauccaauggccuuaagua

SEQ ID NO: 47108 - DNA, 21 bp, Homo sapiens
aataggttaccggaattcatt

SEQ ID NO: 47109 - RNA, 21 nt, RNAi
uagguuaccggaauucauuuu

SEQ ID NO: 47110 - RNA, 21 nt, RNAi
uuauccaauggccuuaaguaa

SEQ ID NO: 47111 - DNA, 21 bp, Homo sapiens
aagacagatgattcagttgta

SEQ ID NO: 47112 - RNA, 21 nt, RNAi
gacagaugauucaguuguauu

SEQ ID NO: 47113 - RNA, 21 nt, RNAi
uucugucuacuaagucaacau

SEQ ID NO: 47114 - DNA, 21 bp, Homo sapiens
aaagacaaacctctagatcag

SEQ ID NO: 47115 - RNA, 21 nt, RNAi
agacaaaccucuagaucaguu

SEQ ID NO: 47116 - RNA, 21 nt, RNAi
uuucuguuuggagaucuaguc

SEQ ID NO: 47117 - DNA, 21 bp, Homo sapiens
aagacaaacctctagatcaga

SEQ ID NO: 47118 - RNA, 21 nt, RNAi
gacaaaccucuagaucagauu

SEQ ID NO: 47119 - RNA, 21 nt, RNAi
uucuguuuggagaucuagucu

SEQ ID NO: 47120 - DNA, 21 bp, Homo sapiens
aaacctctagatcagaatgcc

SEQ ID NO: 47121 - RNA, 21 nt, RNAi
accucuagaucagaaugccuu

SEQ ID NO: 47122 - RNA, 21 nt, RNAi
uuuggagaucuagucuuacgg

SEQ ID NO: 47123 - DNA, 21 bp, Homo sapiens
aacctctagatcagaatgccg

SEQ ID NO: 47124 - RNA, 21 nt, RNAi
ccucuagaucagaaugccguu

SEQ ID NO: 47125 - RNA, 21 nt, RNAi
uuggagaucuagucuuacggc

SEQ ID NO: 47126 - DNA, 21 bp, Homo sapiens
aatgccgagatttggttgtgc

SEQ ID NO: 47127 - RNA, 21 nt, RNAi
ugccgagauuugguugugcuu

SEQ ID NO: 47128 - RNA, 21 nt, RNAi
uuacggcucuaaaccaacacg

SEQ ID NO: 47129 - DNA, 21 bp, Homo sapiens
aaaccaagtggaaatgattcc

SEQ ID NO: 47130 - RNA, 21 nt, RNAi
accaaguggaaaugauuccuu

SEQ ID NO: 47131 - RNA, 21 nt, RNAi
uuugguucaccuuuacuaagg

SEQ ID NO: 47132 - DNA, 21 bp, Homo sapiens
aaccaagtggaaatgattcct

SEQ ID NO: 47133 - RNA, 21 nt, RNAi
ccaaguggaaaugauuccuuu

SEQ ID NO: 47134 - RNA, 21 nt, RNAi
uugguucaccuuuacuaagga

SEQ ID NO: 47135 - DNA, 21 bp, Homo sapiens
aagtggaaatgattcctgtga

SEQ ID NO: 47136 - RNA, 21 nt, RNAi
guggaaaugauuccugugauu

SEQ ID NO: 47137 - RNA, 21 nt, RNAi
uucaccuuuacuaaggacacu

SEQ ID NO: 47138 - DNA, 21 bp, Homo sapiens
aaatagtcatttcaaggaacc

SEQ ID NO: 47139 - RNA, 21 nt, RNAi
auagucauuucaaggaaccuu

SEQ ID NO: 47140 - RNA, 21 nt, RNAi
uuuaucaguaaaguuccuugg

SEQ ID NO: 47141 - DNA, 21 bp, Homo sapiens
aatagtcatttcaaggaacct

SEQ ID NO: 47142 - RNA, 21 nt, RNAi
uagucauuucaaggaaccuuu

SEQ ID NO: 47143 - RNA, 21 nt, RNAi
uuaucaguaaaguuccuugga

SEQ ID NO: 47144 - DNA, 21 bp, Homo sapiens
aaggaacctctggtgtcagat

SEQ ID NO: 47145 - RNA, 21 nt, RNAi
ggaaccucuggugucagauuu

SEQ ID NO: 47146 - RNA, 21 nt, RNAi
uuccuuggagaccacagucua

SEQ ID NO: 47147 - DNA, 21 bp, Homo sapiens
aacctctggtgtcagatgaaa

SEQ ID NO: 47148 - RNA, 21 nt, RNAi
ccucuggugucagaugaaauu

SEQ ID NO: 47149 - RNA, 21 nt, RNAi
uuggagaccacagucuacuuu

SEQ ID NO: 47150 - DNA, 21 bp, Homo sapiens
aaacggaatcaagtcttctag

SEQ ID NO: 47151 - RNA, 21 nt, RNAi
acggaaucaagucuucuaguu

SEQ ID NO: 47152 - RNA, 21 nt, RNAi
uuugccuuaguucagaagauc

SEQ ID NO: 47153 - DNA, 21 bp, Homo sapiens
aacggaatcaagtcttctagc

SEQ ID NO: 47154 - RNA, 21 nt, RNAi
cggaaucaagucuucuagcuu

SEQ ID NO: 47155 - RNA, 21 nt, RNAi
uugccuuaguucagaagaucg

SEQ ID NO: 47156 - DNA, 21 bp, Homo sapiens
aactaaagagtatcaagaacc

SEQ ID NO: 47157 - RNA, 21 nt, RNAi
cuaaagaguaucaagaaccuu

SEQ ID NO: 47158 - RNA, 21 nt, RNAi
uugauuucucauaguucuugg

SEQ ID NO: 47159 - DNA, 21 bp, Homo sapiens
aaagagtatcaagaaccagag

SEQ ID NO: 47160 - RNA, 21 nt, RNAi
agaguaucaagaaccagaguu

SEQ ID NO: 47161 - RNA, 21 nt, RNAi
uuucucauaguucuuggucuc

SEQ ID NO: 47162 - DNA, 21 bp, Homo sapiens
aagagtatcaagaaccagagg

SEQ ID NO: 47163 - RNA, 21 nt, RNAi
gaguaucaagaaccagagguu

SEQ ID NO: 47164 - RNA, 21 nt, RNAi
uucucauaguucuuggucucc

SEQ ID NO: 47165 - DNA, 21 bp, Homo sapiens
aagaaccagaggttccagaga

SEQ ID NO: 47166 - RNA, 21 nt, RNAi
gaaccagagguuccagagauu

SEQ ID NO: 47167 - RNA, 21 nt, RNAi
uucuuggucuccaaggucucu

SEQ ID NO: 47168 - DNA, 21 bp, Homo sapiens
aaccagaggttccagagagta

SEQ ID NO: 47169 - RNA, 21 nt, RNAi
ccagagguuccagagaguauu

SEQ ID NO: 47170 - RNA, 21 nt, RNAi
uuggucuccaaggucucucau

SEQ ID NO: 47171 - DNA, 21 bp, Homo sapiens
aaccagaaacagtggcaatct

SEQ ID NO: 47172 - RNA, 21 nt, RNAi
ccagaaacaguggcaaucuuu

SEQ ID NO: 47173 - RNA, 21 nt, RNAi
uuggucuuugucaccguuaga

SEQ ID NO: 47174 - DNA, 21 bp, Homo sapiens
aaacagtggcaatctaagaga

SEQ ID NO: 47175 - RNA, 21 nt, RNAi
acaguggcaaucuaagagauu

SEQ ID NO: 47176 - RNA, 21 nt, RNAi
uuugucaccguuagauucucu

SEQ ID NO: 47177 - DNA, 21 bp, Homo sapiens
aacagtggcaatctaagagaa

SEQ ID NO: 47178 - RNA, 21 nt, RNAi
caguggcaaucuaagagaauu

SEQ ID NO: 47179 - RNA, 21 nt, RNAi
uugucaccguuagauucucuu

SEQ ID NO: 47180 - DNA, 21 bp, Homo sapiens
aatctaagagaaagtcagagt

SEQ ID NO: 47181 - RNA, 21 nt, RNAi
ucuaagagaaagucagaguuu

SEQ ID NO: 47182 - RNA, 21 nt, RNAi
uuagauucucuuucagucuca

SEQ ID NO: 47183 - DNA, 21 bp, Homo sapiens
aagagaaagtcagagtgtatt

SEQ ID NO: 47184 - RNA, 21 nt, RNAi
gagaaagucagaguguauuuu

SEQ ID NO: 47185 - RNA, 21 nt, RNAi
uucucuuucagucucacauaa

SEQ ID NO: 47186 - DNA, 21 bp, Homo sapiens
aaagtcagagtgtattaacca

SEQ ID NO: 47187 - RNA, 21 nt, RNAi
agucagaguguauuaaccauu

SEQ ID NO: 47188 - RNA, 21 nt, RNAi
uuucagucucacauaauuggu

SEQ ID NO: 47189 - DNA, 21 bp, Homo sapiens
aagtcagagtgtattaaccag

SEQ ID NO: 47190 - RNA, 21 nt, RNAi
gucagaguguauuaaccaguu

SEQ ID NO: 47191 - RNA, 21 nt, RNAi
uucagucucacauaauugguc

SEQ ID NO: 47192 - DNA, 21 bp, Homo sapiens
aaccagaatcctgctgcatct

SEQ ID NO: 47193 - RNA, 21 nt, RNAi
ccagaauccugcugcaucuuu

SEQ ID NO: 47194 - RNA, 21 nt, RNAi
uuggucuuaggacgacguaga

SEQ ID NO: 47195 - DNA, 21 bp, Homo sapiens
aatcctgctgcatcttcaaat

SEQ ID NO: 47196 - RNA, 21 nt, RNAi
uccugcugcaucuucaaauuu

SEQ ID NO: 47197 - RNA, 21 nt, RNAi
uuaggacgacguagaaguuua

SEQ ID NO: 47198 - DNA, 21 bp, Homo sapiens
aaatcactggcagattccgga

SEQ ID NO: 47199 - RNA, 21 nt, RNAi
aucacuggcagauuccggauu

SEQ ID NO: 47200 - RNA, 21 nt, RNAi
uuuagugaccgucuaaggccu

SEQ ID NO: 47201 - DNA, 21 bp, Homo sapiens
aatcactggcagattccggag

SEQ ID NO: 47202 - RNA, 21 nt, RNAi
ucacuggcagauuccggaguu

SEQ ID NO: 47203 - RNA, 21 nt, RNAi
uuagugaccgucuaaggccuc

SEQ ID NO: 47204 - DNA, 21 bp, Homo sapiens
aagttaatacagagcagaaac

SEQ ID NO: 47205 - RNA, 21 nt, RNAi
guuaauacagagcagaaacuu

SEQ ID NO: 47206 - RNA, 21 nt, RNAi
uucaauuaugucucgucuuug

SEQ ID NO: 47207 - DNA, 21 bp, Homo sapiens
aatacagagcagaaacatacc

SEQ ID NO: 47208 - RNA, 21 nt, RNAi
uacagagcagaaacauaccuu

SEQ ID NO: 47209 - RNA, 21 nt, RNAi
uuaugucucgucuuuguaugg

SEQ ID NO: 47210 - DNA, 21 bp, Homo sapiens
aaacagtcaccaccaatatca

SEQ ID NO: 47211 - RNA, 21 nt, RNAi
acagucaccaccaauaucauu

SEQ ID NO: 47212 - RNA, 21 nt, RNAi
uuugucaguggugguuauagu

SEQ ID NO: 47213 - DNA, 21 bp, Homo sapiens
aacagtcaccaccaatatcaa

SEQ ID NO: 47214 - RNA, 21 nt, RNAi
cagucaccaccaauaucaauu

SEQ ID NO: 47215 - RNA, 21 nt, RNAi
uugucaguggugguuauaguu

SEQ ID NO: 47216 - DNA, 21 bp, Homo sapiens
aagacaccaagcagcaatacc

SEQ ID NO: 47217 - RNA, 21 nt, RNAi
gacaccaagcagcaauaccuu

SEQ ID NO: 47218 - RNA, 21 nt, RNAi
uucugugguucgucguuaugg

SEQ ID NO: 47219 - DNA, 21 bp, Homo sapiens
aagcagcaataccttggatga

SEQ ID NO: 47220 - RNA, 21 nt, RNAi
gcagcaauaccuuggaugauu

SEQ ID NO: 47221 - RNA, 21 nt, RNAi
uucgucguuauggaaccuacu

SEQ ID NO: 47222 - DNA, 21 bp, Homo sapiens
aataccttggatgattacatg

SEQ ID NO: 47223 - RNA, 21 nt, RNAi
uaccuuggaugauuacauguu

SEQ ID NO: 47224 - RNA, 21 nt, RNAi
uuauggaaccuacuaauguac

SEQ ID NO: 47225 - DNA, 21 bp, Homo sapiens
aactccagttgtaaagaatga

SEQ ID NO: 47226 - RNA, 21 nt, RNAi
cuccaguuguaaagaaugauu

SEQ ID NO: 47227 - RNA, 21 nt, RNAi
uugaggucaacauuucuuacu

SEQ ID NO: 47228 - DNA, 21 bp, Homo sapiens
aaagaatgactttccacctgc

SEQ ID NO: 47229 - RNA, 21 nt, RNAi
agaaugacuuuccaccugcuu

SEQ ID NO: 47230 - RNA, 21 nt, RNAi
uuucuuacugaaagguggacg

SEQ ID NO: 47231 - DNA, 21 bp, Homo sapiens
aagaatgactttccacctgct

SEQ ID NO: 47232 - RNA, 21 nt, RNAi
gaaugacuuuccaccugcuuu

SEQ ID NO: 47233 - RNA, 21 nt, RNAi
uucuuacugaaagguggacga

SEQ ID NO: 47234 - DNA, 21 bp, Homo sapiens
aatgactttccacctgcttgt

SEQ ID NO: 47235 - RNA, 21 nt, RNAi
ugacuuuccaccugcuuguuu

SEQ ID NO: 47236 - RNA, 21 nt, RNAi
uuacugaaagguggacgaaca

SEQ ID NO: 47237 - DNA, 21 bp, Homo sapiens
aacaccttatggccaacctgc

SEQ ID NO: 47238 - RNA, 21 nt, RNAi
caccuuauggccaaccugcuu

SEQ ID NO: 47239 - RNA, 21 nt, RNAi
uuguggaauaccgguuggacg

SEQ ID NO: 47240 - DNA, 21 bp, Homo sapiens
aacctgcctgtttccagcagc

SEQ ID NO: 47241 - RNA, 21 nt, RNAi
ccugccuguuuccagcagcuu

SEQ ID NO: 47242 - RNA, 21 nt, RNAi
uuggacggacaaaggucgucg

SEQ ID NO: 47243 - DNA, 21 bp, Homo sapiens
aacagcatcaaatacttgcca

SEQ ID NO: 47244 - RNA, 21 nt, RNAi
cagcaucaaauacuugccauu

SEQ ID NO: 47245 - RNA, 21 nt, RNAi
uugucguaguuuaugaacggu

SEQ ID NO: 47246 - DNA, 21 bp, Homo sapiens
aaatacttgccactccacttc

SEQ ID NO: 47247 - RNA, 21 nt, RNAi
auacuugccacuccacuucuu

SEQ ID NO: 47248 - RNA, 21 nt, RNAi
uuuaugaacggugaggugaag

SEQ ID NO: 47249 - DNA, 21 bp, Homo sapiens
aatacttgccactccacttca

SEQ ID NO: 47250 - RNA, 21 nt, RNAi
uacuugccacuccacuucauu

SEQ ID NO: 47251 - RNA, 21 nt, RNAi
uuaugaacggugaggugaagu

SEQ ID NO: 47252 - DNA, 21 bp, Homo sapiens
aatgcatttcggttaaaggaa

SEQ ID NO: 47253 - RNA, 21 nt, RNAi
ugcauuucgguuaaaggaauu

SEQ ID NO: 47254 - RNA, 21 nt, RNAi
uuacguaaagccaauuuccuu

SEQ ID NO: 47255 - DNA, 21 bp, Homo sapiens
aaagcagataggaagtggagg

SEQ ID NO: 47256 - RNA, 21 nt, RNAi
agcagauaggaaguggagguu

SEQ ID NO: 47257 - RNA, 21 nt, RNAi
uuucgucuauccuucaccucc

SEQ ID NO: 47258 - DNA, 21 bp, Homo sapiens
aagcagataggaagtggaggt

SEQ ID NO: 47259 - RNA, 21 nt, RNAi
gcagauaggaaguggagguuu

SEQ ID NO: 47260 - RNA, 21 nt, RNAi
uucgucuauccuucaccucca

SEQ ID NO: 47261 - DNA, 21 bp, Homo sapiens
aagtggaggttcaagcaaggt

SEQ ID NO: 47262 - RNA, 21 nt, RNAi
guggagguucaagcaagguuu

SEQ ID NO: 47263 - RNA, 21 nt, RNAi
uucaccuccaaguucguucca

SEQ ID NO: 47264 - DNA, 21 bp, Homo sapiens
aagcaaggtatttcaggtgtt

SEQ ID NO: 47265 - RNA, 21 nt, RNAi
gcaagguauuucagguguuuu

SEQ ID NO: 47266 - RNA, 21 nt, RNAi
uucguuccauaaaguccacaa

SEQ ID NO: 47267 - DNA, 21 bp, Homo sapiens
aacttagaagaagcagataac

SEQ ID NO: 47268 - RNA, 21 nt, RNAi
cuuagaagaagcagauaacuu

SEQ ID NO: 47269 - RNA, 21 nt, RNAi
uugaaucuucuucgucuauug

SEQ ID NO: 47270 - DNA, 21 bp, Homo sapiens
aagaagcagataaccaaactc

SEQ ID NO: 47271 - RNA, 21 nt, RNAi
gaagcagauaaccaaacucuu

SEQ ID NO: 47272 - RNA, 21 nt, RNAi
uucuucgucuauugguuugag

SEQ ID NO: 47273 - DNA, 21 bp, Homo sapiens
aagcagataaccaaactcttg

SEQ ID NO: 47274 - RNA, 21 nt, RNAi
gcagauaaccaaacucuuguu

SEQ ID NO: 47275 - RNA, 21 nt, RNAi
uucgucuauugguuugagaac

SEQ ID NO: 47276 - DNA, 21 bp, Homo sapiens
aaccaaactcttgatagttac

SEQ ID NO: 47277 - RNA, 21 nt, RNAi
ccaaacucuugauaguuacuu

SEQ ID NO: 47278 - RNA, 21 nt, RNAi
uugguuugagaacuaucaaug

SEQ ID NO: 47279 - DNA, 21 bp, Homo sapiens
aaactcttgatagttaccgga

SEQ ID NO: 47280 - RNA, 21 nt, RNAi
acucuugauaguuaccggauu

SEQ ID NO: 47281 - RNA, 21 nt, RNAi
uuugagaacuaucaauggccu

SEQ ID NO: 47282 - DNA, 21 bp, Homo sapiens
aactcttgatagttaccggaa

SEQ ID NO: 47283 - RNA, 21 nt, RNAi
cucuugauaguuaccggaauu

SEQ ID NO: 47284 - RNA, 21 nt, RNAi
uugagaacuaucaauggccuu

SEQ ID NO: 47285 - DNA, 21 bp, Homo sapiens
aaactacaacaacacagtgat

SEQ ID NO: 47286 - RNA, 21 nt, RNAi
acuacaacaacacagugauuu

SEQ ID NO: 47287 - RNA, 21 nt, RNAi
uuugauguuguugugucacua

SEQ ID NO: 47288 - DNA, 21 bp, Homo sapiens
aactacaacaacacagtgata

SEQ ID NO: 47289 - RNA, 21 nt, RNAi
cuacaacaacacagugauauu

SEQ ID NO: 47290 - RNA, 21 nt, RNAi
uugauguuguugugucacuau

SEQ ID NO: 47291 - DNA, 21 bp, Homo sapiens
aacaacacagtgataagatca

SEQ ID NO: 47292 - RNA, 21 nt, RNAi
caacacagugauaagaucauu

SEQ ID NO: 47293 - RNA, 21 nt, RNAi
uuguugugucacuauucuagu

SEQ ID NO: 47294 - DNA, 21 bp, Homo sapiens
aacacagtgataagatcatcc

SEQ ID NO: 47295 - RNA, 21 nt, RNAi
cacagugauaagaucauccuu

SEQ ID NO: 47296 - RNA, 21 nt, RNAi
uugugucacuauucuaguagg

SEQ ID NO: 47297 - DNA, 21 bp, Homo sapiens
aagatcatccgactttatgat

SEQ ID NO: 47298 - RNA, 21 nt, RNAi
gaucauccgacuuuaugauuu

SEQ ID NO: 47299 - RNA, 21 nt, RNAi
uucuaguaggcugaaauacua

SEQ ID NO: 47300 - DNA, 21 bp, Homo sapiens
aaatcacggaccagtacatct

SEQ ID NO: 47301 - RNA, 21 nt, RNAi
aucacggaccaguacaucuuu

SEQ ID NO: 47302 - RNA, 21 nt, RNAi
uuuagugccuggucauguaga

SEQ ID NO: 47303 - DNA, 21 bp, Homo sapiens
aatcacggaccagtacatcta

SEQ ID NO: 47304 - RNA, 21 nt, RNAi
ucacggaccaguacaucuauu

SEQ ID NO: 47305 - RNA, 21 nt, RNAi
uuagugccuggucauguagau

SEQ ID NO: 47306 - DNA, 21 bp, Homo sapiens
aatggagtgtggaaatattga

SEQ ID NO: 47307 - RNA, 21 nt, RNAi
uggaguguggaaauauugauu

SEQ ID NO: 47308 - RNA, 21 nt, RNAi
uuaccucacaccuuuauaacu

SEQ ID NO: 47309 - DNA, 21 bp, Homo sapiens
aaatatgttagaggcagttca

SEQ ID NO: 47310 - RNA, 21 nt, RNAi
auauguuagaggcaguucauu

SEQ ID NO: 47311 - RNA, 21 nt, RNAi
uuuauacaaucuccgucaagu

SEQ ID NO: 47312 - DNA, 21 bp, Homo sapiens
aatatgttagaggcagttcac

SEQ ID NO: 47313 - RNA, 21 nt, RNAi
uauguuagaggcaguucacuu

SEQ ID NO: 47314 - RNA, 21 nt, RNAi
uuauacaaucuccgucaagug

SEQ ID NO: 47315 - DNA, 21 bp, Homo sapiens
aatccatcaacatggcattgt

SEQ ID NO: 47316 - RNA, 21 nt, RNAi
uccaucaacauggcauuguuu

SEQ ID NO: 47317 - RNA, 21 nt, RNAi
uuagguaguuguaccguaaca

SEQ ID NO: 47318 - DNA, 21 bp, Homo sapiens
aacatggcattgttcacagtg

SEQ ID NO: 47319 - RNA, 21 nt, RNAi
cauggcauuguucacaguguu

SEQ ID NO: 47320 - RNA, 21 nt, RNAi
uuguaccguaacaagugucac

SEQ ID NO: 47321 - DNA, 21 bp, Homo sapiens
aaaccagctaactttctgata

SEQ ID NO: 47322 - RNA, 21 nt, RNAi
accagcuaacuuucugauauu

SEQ ID NO: 47323 - RNA, 21 nt, RNAi
uuuggucgauugaaagacuau

SEQ ID NO: 47324 - DNA, 21 bp, Homo sapiens
aaccagctaactttctgatag

SEQ ID NO: 47325 - RNA, 21 nt, RNAi
ccagcuaacuuucugauaguu

SEQ ID NO: 47326 - RNA, 21 nt, RNAi
uuggucgauugaaagacuauc

SEQ ID NO: 47327 - DNA, 21 bp, Homo sapiens
aactttctgatagttgatgga

SEQ ID NO: 47328 - RNA, 21 nt, RNAi
cuuucugauaguugauggauu

SEQ ID NO: 47329 - RNA, 21 nt, RNAi
uugaaagacuaucaacuaccu

SEQ ID NO: 47330 - DNA, 21 bp, Homo sapiens
aaaccaaatgcaaccagatac

SEQ ID NO: 47331 - RNA, 21 nt, RNAi
accaaaugcaaccagauacuu

SEQ ID NO: 47332 - RNA, 21 nt, RNAi
uuugguuuacguuggucuaug

SEQ ID NO: 47333 - DNA, 21 bp, Homo sapiens
aaccaaatgcaaccagataca

SEQ ID NO: 47334 - RNA, 21 nt, RNAi
ccaaaugcaaccagauacauu

SEQ ID NO: 47335 - RNA, 21 nt, RNAi
uugguuuacguuggucuaugu

SEQ ID NO: 47336 - DNA, 21 bp, Homo sapiens
aaatgcaaccagatacaacaa

SEQ ID NO: 47337 - RNA, 21 nt, RNAi
augcaaccagauacaacaauu

SEQ ID NO: 47338 - RNA, 21 nt, RNAi
uuuacguuggucuauguuguu

SEQ ID NO: 47339 - DNA, 21 bp, Homo sapiens
aatgcaaccagatacaacaag

SEQ ID NO: 47340 - RNA, 21 nt, RNAi
ugcaaccagauacaacaaguu

SEQ ID NO: 47341 - RNA, 21 nt, RNAi
uuacguuggucuauguuguuc

SEQ ID NO: 47342 - DNA, 21 bp, Homo sapiens
aaccagatacaacaagtgttg

SEQ ID NO: 47343 - RNA, 21 nt, RNAi
ccagauacaacaaguguuguu

SEQ ID NO: 47344 - RNA, 21 nt, RNAi
uuggucuauguuguucacaac

SEQ ID NO: 47345 - DNA, 21 bp, Homo sapiens
aaagattctcaggttggcaca

SEQ ID NO: 47346 - RNA, 21 nt, RNAi
agauucucagguuggcacauu

SEQ ID NO: 47347 - RNA, 21 nt, RNAi
uuucuaagaguccaaccgugu

SEQ ID NO: 47348 - DNA, 21 bp, Homo sapiens
aagattctcaggttggcacag

SEQ ID NO: 47349 - RNA, 21 nt, RNAi
gauucucagguuggcacaguu

SEQ ID NO: 47350 - RNA, 21 nt, RNAi
uucuaagaguccaaccguguc

SEQ ID NO: 47351 - DNA, 21 bp, Homo sapiens
aattatatgccaccagaagca

SEQ ID NO: 47352 - RNA, 21 nt, RNAi
uuauaugccaccagaagcauu

SEQ ID NO: 47353 - RNA, 21 nt, RNAi
uuaauauacgguggucuucgu

SEQ ID NO: 47354 - DNA, 21 bp, Homo sapiens
aatcaaagatatgtcttcctc

SEQ ID NO: 47355 - RNA, 21 nt, RNAi
ucaaagauaugucuuccucuu

SEQ ID NO: 47356 - RNA, 21 nt, RNAi
uuaguuucuauacagaaggag

SEQ ID NO: 47357 - DNA, 21 bp, Homo sapiens
aaagatatgtcttcctccaga

SEQ ID NO: 47358 - RNA, 21 nt, RNAi
agauaugucuuccuccagauu

SEQ ID NO: 47359 - RNA, 21 nt, RNAi
uuucuauacagaaggaggucu

SEQ ID NO: 47360 - DNA, 21 bp, Homo sapiens
aagatatgtcttcctccagag

SEQ ID NO: 47361 - RNA, 21 nt, RNAi
gauaugucuuccuccagaguu

SEQ ID NO: 47362 - RNA, 21 nt, RNAi
uucuauacagaaggaggucuc

SEQ ID NO: 47363 - DNA, 21 bp, Homo sapiens
aatctaagtcaaagataagcc

SEQ ID NO: 47364 - RNA, 21 nt, RNAi
ucuaagucaaagauaagccuu

SEQ ID NO: 47365 - RNA, 21 nt, RNAi
uuagauucaguuucuauucgg

SEQ ID NO: 47366 - DNA, 21 bp, Homo sapiens
aaagtgatgtttggtccttag

SEQ ID NO: 47367 - RNA, 21 nt, RNAi
agugauguuugguccuuaguu

SEQ ID NO: 47368 - RNA, 21 nt, RNAi
uuucacuacaaaccaggaauc

SEQ ID NO: 47369 - DNA, 21 bp, Homo sapiens
aagtgatgtttggtccttagg

SEQ ID NO: 47370 - RNA, 21 nt, RNAi
gugauguuugguccuuagguu

SEQ ID NO: 47371 - RNA, 21 nt, RNAi
uucacuacaaaccaggaaucc

SEQ ID NO: 47372 - DNA, 21 bp, Homo sapiens
aaacaccatttcagcagataa

SEQ ID NO: 47373 - RNA, 21 nt, RNAi
acaccauuucagcagauaauu

SEQ ID NO: 47374 - RNA, 21 nt, RNAi
uuugugguaaagucgucuauu

SEQ ID NO: 47375 - DNA, 21 bp, Homo sapiens
aacaccatttcagcagataat

SEQ ID NO: 47376 - RNA, 21 nt, RNAi
caccauuucagcagauaauuu

SEQ ID NO: 47377 - RNA, 21 nt, RNAi
uugugguaaagucgucuauua

SEQ ID NO: 47378 - DNA, 21 bp, Homo sapiens
aaacagaggatatccattcct

SEQ ID NO: 47379 - RNA, 21 nt, RNAi
acagaggauauccauuccuuu

SEQ ID NO: 47380 - RNA, 21 nt, RNAi
uuugucuccuauagguaagga

SEQ ID NO: 47381 - DNA, 21 bp, Homo sapiens
aacagaggatatccattcctg

SEQ ID NO: 47382 - RNA, 21 nt, RNAi
cagaggauauccauuccuguu

SEQ ID NO: 47383 - RNA, 21 nt, RNAi
uugucuccuauagguaaggac

SEQ ID NO: 47384 - DNA, 21 bp, Homo sapiens
aaactcatccagttaaccaaa

SEQ ID NO: 47385 - RNA, 21 nt, RNAi
acucauccaguuaaccaaauu

SEQ ID NO: 47386 - RNA, 21 nt, RNAi
uuugaguaggucaauugguuu

SEQ ID NO: 47387 - DNA, 21 bp, Homo sapiens
aactcatccagttaaccaaat

SEQ ID NO: 47388 - RNA, 21 nt, RNAi
cucauccaguuaaccaaauuu

SEQ ID NO: 47389 - RNA, 21 nt, RNAi
uugaguaggucaauugguuua

SEQ ID NO: 47390 - DNA, 21 bp, Homo sapiens
aacttgttggtctgaattctc

SEQ ID NO: 47391 - RNA, 21 nt, RNAi
cuuguuggucugaauucucuu

SEQ ID NO: 47392 - RNA, 21 nt, RNAi
uugaacaaccagacuuaagag

SEQ ID NO: 47393 - DNA, 21 bp, Homo sapiens
aacactatagtggtggtgaaa

SEQ ID NO: 47394 - RNA, 21 nt, RNAi
cacuauagugguggugaaauu

SEQ ID NO: 47395 - RNA, 21 nt, RNAi
uugugauaucaccaccacuuu

SEQ ID NO: 47396 - DNA, 21 bp, Homo sapiens
aagtcataattcttcatcctc

SEQ ID NO: 47397 - RNA, 21 nt, RNAi
gucauaauucuucauccucuu

SEQ ID NO: 47398 - RNA, 21 nt, RNAi
uucaguauuaagaaguaggag

SEQ ID NO: 47399 - DNA, 21 bp, Homo sapiens
aattcttcatcctccaagact

SEQ ID NO: 47400 - RNA, 21 nt, RNAi
uucuucauccuccaagacuuu

SEQ ID NO: 47401 - RNA, 21 nt, RNAi
uuaagaaguaggagguucuga

SEQ ID NO: 47402 - DNA, 21 bp, Homo sapiens
aatgtcagataccacctataa

SEQ ID NO: 47403 - RNA, 21 nt, RNAi
ugucagauaccaccuauaauu

SEQ ID NO: 47404 - RNA, 21 nt, RNAi
uuacagucuaugguggauauu

SEQ ID NO: 47405 - DNA, 21 bp, Homo sapiens
aagacaacatcactctgaagt

SEQ ID NO: 47406 - RNA, 21 nt, RNAi
gacaacaucacucugaaguuu

SEQ ID NO: 47407 - RNA, 21 nt, RNAi
uucuguuguagugagacuuca

SEQ ID NO: 47408 - DNA, 21 bp, Homo sapiens
aacatcactctgaagtgttat

SEQ ID NO: 47409 - RNA, 21 nt, RNAi
caucacucugaaguguuauuu

SEQ ID NO: 47410 - RNA, 21 nt, RNAi
uuguagugagacuucacaaua

SEQ ID NO: 47411 - DNA, 21 bp, Homo sapiens
aaatagcaaccacttatggca

SEQ ID NO: 47412 - RNA, 21 nt, RNAi
auagcaaccacuuauggcauu

SEQ ID NO: 47413 - RNA, 21 nt, RNAi
uuuaucguuggugaauaccgu

SEQ ID NO: 47414 - DNA, 21 bp, Homo sapiens
aatagcaaccacttatggcac

SEQ ID NO: 47415 - RNA, 21 nt, RNAi
uagcaaccacuuauggcacuu

SEQ ID NO: 47416 - RNA, 21 nt, RNAi
uuaucguuggugaauaccgug

SEQ ID NO: 47417 - DNA, 21 bp, Homo sapiens
aaccacttatggcactgtata

SEQ ID NO: 47418 - RNA, 21 nt, RNAi
ccacuuauggcacuguauauu

SEQ ID NO: 47419 - RNA, 21 nt, RNAi
uuggugaauaccgugacauau

SEQ ID NO: 47420 - DNA, 21 bp, Homo sapiens
cagcgcagctttctgtagaaa

SEQ ID NO: 47421 - RNA, 21 nt, RNAi
gcgcagcuuucuguagaaauu

SEQ ID NO: 47422 - RNA, 21 nt, RNAi
uucgcgucgaaagacaucuuu

SEQ ID NO: 47423 - DNA, 21 bp, Homo sapiens
cagctttctgtagaaatggaa

SEQ ID NO: 47424 - RNA, 21 nt, RNAi
gcuuucuguagaaauggaauu

SEQ ID NO: 47425 - RNA, 21 nt, RNAi
uucgaaagacaucuuuaccuu

SEQ ID NO: 47426 - DNA, 21 bp, Homo sapiens
cagagaattgacaattgattc

SEQ ID NO: 47427 - RNA, 21 nt, RNAi
gagaauugacaauugauucuu

SEQ ID NO: 47428 - RNA, 21 nt, RNAi
uucucuuaacuguuaacuaag

SEQ ID NO: 47429 - DNA, 21 bp, Homo sapiens
cataatgaacaaagtgagaga

SEQ ID NO: 47430 - RNA, 21 nt, RNAi
uaaugaacaaagugagagauu

SEQ ID NO: 47431 - RNA, 21 nt, RNAi
uuauuacuuguuucacucucu

SEQ ID NO: 47432 - DNA, 21 bp, Homo sapiens
caaattatgatgatggcaaac

SEQ ID NO: 47433 - RNA, 21 nt, RNAi
aauuaugaugauggcaaacuu

SEQ ID NO: 47434 - RNA, 21 nt, RNAi
uuuuaauacuacuaccguuug

SEQ ID NO: 47435 - DNA, 21 bp, Homo sapiens
cagaggactggttgagtttgt

SEQ ID NO: 47436 - RNA, 21 nt, RNAi
gaggacugguugaguuuguuu

SEQ ID NO: 47437 - RNA, 21 nt, RNAi
uucuccugaccaacucaaaca

SEQ ID NO: 47438 - DNA, 21 bp, Homo sapiens
cagtgttccgctaagtgatgc

SEQ ID NO: 47439 - RNA, 21 nt, RNAi
guguuccgcuaagugaugcuu

SEQ ID NO: 47440 - RNA, 21 nt, RNAi
uucacaaggcgauucacuacg

SEQ ID NO: 47441 - DNA, 21 bp, Homo sapiens
cagtcaagcaattgaagcgct

SEQ ID NO: 47442 - RNA, 21 nt, RNAi
gucaagcaauugaagcgcuuu

SEQ ID NO: 47443 - RNA, 21 nt, RNAi
uucaguucguuaacuucgcga

SEQ ID NO: 47444 - DNA, 21 bp, Homo sapiens
caagtgagatttgctgaatta

SEQ ID NO: 47445 - RNA, 21 nt, RNAi
agugagauuugcugaauuauu

SEQ ID NO: 47446 - RNA, 21 nt, RNAi
uuucacucuaaacgacuuaau

SEQ ID NO: 47447 - DNA, 21 bp, Homo sapiens
caagagccagatgatgcacgt

SEQ ID NO: 47448 - RNA, 21 nt, RNAi
agagccagaugaugcacguuu

SEQ ID NO: 47449 - RNA, 21 nt, RNAi
uuucucggucuacuacgugca

SEQ ID NO: 47450 - DNA, 21 bp, Homo sapiens
cagatgatgcacgtgactact

SEQ ID NO: 47451 - RNA, 21 nt, RNAi
gaugaugcacgugacuacuuu

SEQ ID NO: 47452 - RNA, 21 nt, RNAi
uucuacuacgugcacugauga

SEQ ID NO: 47453 - DNA, 21 bp, Homo sapiens
cacgtgactactttcaaatgg

SEQ ID NO: 47454 - RNA, 21 nt, RNAi
cgugacuacuuucaaaugguu

SEQ ID NO: 47455 - RNA, 21 nt, RNAi
uugcacugaugaaaguuuacc

SEQ ID NO: 47456 - DNA, 21 bp, Homo sapiens
caaatggccagagcaaactgc

SEQ ID NO: 47457 - RNA, 21 nt, RNAi
aauggccagagcaaacugcuu

SEQ ID NO: 47458 - RNA, 21 nt, RNAi
uuuuaccggucucguuugacg

SEQ ID NO: 47459 - DNA, 21 bp, Homo sapiens
cagagcaaactgcaagaaatt

SEQ ID NO: 47460 - RNA, 21 nt, RNAi
gagcaaacugcaagaaauuuu

SEQ ID NO: 47461 - RNA, 21 nt, RNAi
uucucguuugacguucuuuaa

SEQ ID NO: 47462 - DNA, 21 bp, Homo sapiens
caaactgcaagaaatttgctt

SEQ ID NO: 47463 - RNA, 21 nt, RNAi
aacugcaagaaauuugcuuuu

SEQ ID NO: 47464 - RNA, 21 nt, RNAi
uuuugacguucuuuaaacgaa

SEQ ID NO: 47465 - DNA, 21 bp, Homo sapiens
cacaatttgaactgtcacaag

SEQ ID NO: 47466 - RNA, 21 nt, RNAi
caauuugaacugucacaaguu

SEQ ID NO: 47467 - RNA, 21 nt, RNAi
uuguuaaacuugacaguguuc

SEQ ID NO: 47468 - DNA, 21 bp, Homo sapiens
caatttgaactgtcacaaggt

SEQ ID NO: 47469 - RNA, 21 nt, RNAi
auuugaacugucacaagguuu

SEQ ID NO: 47470 - RNA, 21 nt, RNAi
uuuaaacuugacaguguucca

SEQ ID NO: 47471 - DNA, 21 bp, Homo sapiens
cagtaccactagaaatgctgg

SEQ ID NO: 47472 - RNA, 21 nt, RNAi
guaccacuagaaaugcugguu

SEQ ID NO: 47473 - RNA, 21 nt, RNAi
uucauggugaucuuuacgacc

SEQ ID NO: 47474 - DNA, 21 bp, Homo sapiens
cactagaaatgctggaaattg

SEQ ID NO: 47475 - RNA, 21 nt, RNAi
cuagaaaugcuggaaauuguu

SEQ ID NO: 47476 - RNA, 21 nt, RNAi
uugaucuuuacgaccuuuaac

SEQ ID NO: 47477 - DNA, 21 bp, Homo sapiens
cagctgctttcagaggaggaa

SEQ ID NO: 47478 - RNA, 21 nt, RNAi
gcugcuuucagaggaggaauu

SEQ ID NO: 47479 - RNA, 21 nt, RNAi
uucgacgaaagucuccuccuu

SEQ ID NO: 47480 - DNA, 21 bp, Homo sapiens
cagcatctacggtattaactg

SEQ ID NO: 47481 - RNA, 21 nt, RNAi
gcaucuacgguauuaacuguu

SEQ ID NO: 47482 - RNA, 21 nt, RNAi
uucguagaugccauaauugac

SEQ ID NO: 47483 - DNA, 21 bp, Homo sapiens
catttacagaataggaacaac

SEQ ID NO: 47484 - RNA, 21 nt, RNAi
uuuacagaauaggaacaacuu

SEQ ID NO: 47485 - RNA, 21 nt, RNAi
uuaaaugucuuauccuuguug

SEQ ID NO: 47486 - DNA, 21 bp, Homo sapiens
cagaataggaacaacagttgt

SEQ ID NO: 47487 - RNA, 21 nt, RNAi
gaauaggaacaacaguuguuu

SEQ ID NO: 47488 - RNA, 21 nt, RNAi
uucuuauccuuguugucaaca

SEQ ID NO: 47489 - DNA, 21 bp, Homo sapiens
caacagttgtgattccagagg

SEQ ID NO: 47490 - RNA, 21 nt, RNAi
acaguugugauuccagagguu

SEQ ID NO: 47491 - RNA, 21 nt, RNAi
uuugucaacacuaaggucucc

SEQ ID NO: 47492 - DNA, 21 bp, Homo sapiens
cagttgtgattccagaggaca

SEQ ID NO: 47493 - RNA, 21 nt, RNAi
guugugauuccagaggacauu

SEQ ID NO: 47494 - RNA, 21 nt, RNAi
uucaacacuaaggucuccugu

SEQ ID NO: 47495 - DNA, 21 bp, Homo sapiens
cagaggacagactactaaagc

SEQ ID NO: 47496 - RNA, 21 nt, RNAi
gaggacagacuacuaaagcuu

SEQ ID NO: 47497 - RNA, 21 nt, RNAi
uucuccugucugaugauuucg

SEQ ID NO: 47498 - DNA, 21 bp, Homo sapiens
cagactactaaagccaggttt

SEQ ID NO: 47499 - RNA, 21 nt, RNAi
gacuacuaaagccagguuuuu

SEQ ID NO: 47500 - RNA, 21 nt, RNAi
uucugaugauuucgguccaaa

SEQ ID NO: 47501 - DNA, 21 bp, Homo sapiens
catgccaccacaagatgcaga

SEQ ID NO: 47502 - RNA, 21 nt, RNAi
ugccaccacaagaugcagauu

SEQ ID NO: 47503 - RNA, 21 nt, RNAi
uuacggugguguucuacgucu

SEQ ID NO: 47504 - DNA, 21 bp, Homo sapiens
caccacaagatgcagaaatag

SEQ ID NO: 47505 - RNA, 21 nt, RNAi
ccacaagaugcagaaauaguu

SEQ ID NO: 47506 - RNA, 21 nt, RNAi
uugguguucuacgucuuuauc

SEQ ID NO: 47507 - DNA, 21 bp, Homo sapiens
cacaagatgcagaaataggtt

SEQ ID NO: 47508 - RNA, 21 nt, RNAi
caagaugcagaaauagguuuu

SEQ ID NO: 47509 - RNA, 21 nt, RNAi
uuguucuacgucuuuauccaa

SEQ ID NO: 47510 - DNA, 21 bp, Homo sapiens
caagatgcagaaataggttac

SEQ ID NO: 47511 - RNA, 21 nt, RNAi
agaugcagaaauagguuacuu

SEQ ID NO: 47512 - RNA, 21 nt, RNAi
uuucuacgucuuuauccaaug

SEQ ID NO: 47513 - DNA, 21 bp, Homo sapiens
cagaaataggttaccggaatt

SEQ ID NO: 47514 - RNA, 21 nt, RNAi
gaaauagguuaccggaauuuu

SEQ ID NO: 47515 - RNA, 21 nt, RNAi
uucuuuauccaauggccuuaa

SEQ ID NO: 47516 - DNA, 21 bp, Homo sapiens
cagttaaccttctaaatagcc

SEQ ID NO: 47517 - RNA, 21 nt, RNAi
guuaaccuucuaaauagccuu

SEQ ID NO: 47518 - RNA, 21 nt, RNAi
uucaauuggaagauuuaucgg

SEQ ID NO: 47519 - DNA, 21 bp, Homo sapiens
cagattgtgatgtgaagacag

SEQ ID NO: 47520 - RNA, 21 nt, RNAi
gauugugaugugaagacaguu

SEQ ID NO: 47521 - RNA, 21 nt, RNAi
uucuaacacuacacuucuguc

SEQ ID NO: 47522 - DNA, 21 bp, Homo sapiens
cagatgattcagttgtacctt

SEQ ID NO: 47523 - RNA, 21 nt, RNAi
gaugauucaguuguaccuuuu

SEQ ID NO: 47524 - RNA, 21 nt, RNAi
uucuacuaagucaacauggaa

SEQ ID NO: 47525 - DNA, 21 bp, Homo sapiens
caaacctctagatcagaatgc

SEQ ID NO: 47526 - RNA, 21 nt, RNAi
aaccucuagaucagaaugcuu

SEQ ID NO: 47527 - RNA, 21 nt, RNAi
uuuuggagaucuagucuuacg

SEQ ID NO: 47528 - DNA, 21 bp, Homo sapiens
cagaatgccgagatttggttg

SEQ ID NO: 47529 - RNA, 21 nt, RNAi
gaaugccgagauuugguuguu

SEQ ID NO: 47530 - RNA, 21 nt, RNAi
uucuuacggcucuaaaccaac

SEQ ID NO: 47531 - DNA, 21 bp, Homo sapiens
caagtggaaatgattcctgtg

SEQ ID NO: 47532 - RNA, 21 nt, RNAi
aguggaaaugauuccuguguu

SEQ ID NO: 47533 - RNA, 21 nt, RNAi
uuucaccuuuacuaaggacac

SEQ ID NO: 47534 - DNA, 21 bp, Homo sapiens
catttcaaggaacctctggtg

SEQ ID NO: 47535 - RNA, 21 nt, RNAi
uuucaaggaaccucugguguu

SEQ ID NO: 47536 - RNA, 21 nt, RNAi
uuaaaguuccuuggagaccac

SEQ ID NO: 47537 - DNA, 21 bp, Homo sapiens
caaggaacctctggtgtcaga

SEQ ID NO: 47538 - RNA, 21 nt, RNAi
aggaaccucuggugucagauu

SEQ ID NO: 47539 - RNA, 21 nt, RNAi
uuuccuuggagaccacagucu

SEQ ID NO: 47540 - DNA, 21 bp, Homo sapiens
caagtcttctagctaaattag

SEQ ID NO: 47541 - RNA, 21 nt, RNAi
agucuucuagcuaaauuaguu

SEQ ID NO: 47542 - RNA, 21 nt, RNAi
uuucagaagaucgauuuaauc

SEQ ID NO: 47543 - DNA, 21 bp, Homo sapiens
caagaaccagaggttccagag

SEQ ID NO: 47544 - RNA, 21 nt, RNAi
agaaccagagguuccagaguu

SEQ ID NO: 47545 - RNA, 21 nt, RNAi
uuucuuggucuccaaggucuc

SEQ ID NO: 47546 - DNA, 21 bp, Homo sapiens
cagaggttccagagagtaacc

SEQ ID NO: 47547 - RNA, 21 nt, RNAi
gagguuccagagaguaaccuu

SEQ ID NO: 47548 - RNA, 21 nt, RNAi
uucuccaaggucucucauugg

SEQ ID NO: 47549 - DNA, 21 bp, Homo sapiens
cagagagtaaccagaaacagt

SEQ ID NO: 47550 - RNA, 21 nt, RNAi
gagaguaaccagaaacaguuu

SEQ ID NO: 47551 - RNA, 21 nt, RNAi
uucucucauuggucuuuguca

SEQ ID NO: 47552 - DNA, 21 bp, Homo sapiens
cagaaacagtggcaatctaag

SEQ ID NO: 47553 - RNA, 21 nt, RNAi
gaaacaguggcaaucuaaguu

SEQ ID NO: 47554 - RNA, 21 nt, RNAi
uucuuugucaccguuagauuc

SEQ ID NO: 47555 - DNA, 21 bp, Homo sapiens
cagtggcaatctaagagaaag

SEQ ID NO: 47556 - RNA, 21 nt, RNAi
guggcaaucuaagagaaaguu

SEQ ID NO: 47557 - RNA, 21 nt, RNAi
uucaccguuagauucucuuuc

SEQ ID NO: 47558 - DNA, 21 bp, Homo sapiens
caatctaagagaaagtcagag

SEQ ID NO: 47559 - RNA, 21 nt, RNAi
aucuaagagaaagucagaguu

SEQ ID NO: 47560 - RNA, 21 nt, RNAi
uuuagauucucuuucagucuc

SEQ ID NO: 47561 - DNA, 21 bp, Homo sapiens
cagagtgtattaaccagaatc

SEQ ID NO: 47562 - RNA, 21 nt, RNAi
gaguguauuaaccagaaucuu

SEQ ID NO: 47563 - RNA, 21 nt, RNAi
uucucacauaauuggucuuag

SEQ ID NO: 47564 - DNA, 21 bp, Homo sapiens
cagaatcctgctgcatcttca

SEQ ID NO: 47565 - RNA, 21 nt, RNAi
gaauccugcugcaucuucauu

SEQ ID NO: 47566 - RNA, 21 nt, RNAi
uucuuaggacgacguagaagu

SEQ ID NO: 47567 - DNA, 21 bp, Homo sapiens
catcttcaaatcactggcaga

SEQ ID NO: 47568 - RNA, 21 nt, RNAi
ucuucaaaucacuggcagauu

SEQ ID NO: 47569 - RNA, 21 nt, RNAi
uuagaaguuuagugaccgucu

SEQ ID NO: 47570 - DNA, 21 bp, Homo sapiens
caaatcactggcagattccgg

SEQ ID NO: 47571 - RNA, 21 nt, RNAi
aaucacuggcagauuccgguu

SEQ ID NO: 47572 - RNA, 21 nt, RNAi
uuuuagugaccgucuaaggcc

SEQ ID NO: 47573 - DNA, 21 bp, Homo sapiens
cactggcagattccggagtta

SEQ ID NO: 47574 - RNA, 21 nt, RNAi
cuggcagauuccggaguuauu

SEQ ID NO: 47575 - RNA, 21 nt, RNAi
uugaccgucuaaggccucaau

SEQ ID NO: 47576 - DNA, 21 bp, Homo sapiens
cagagcagaaacataccactt

SEQ ID NO: 47577 - RNA, 21 nt, RNAi
gagcagaaacauaccacuuuu

SEQ ID NO: 47578 - RNA, 21 nt, RNAi
uucucgucuuuguauggugaa

SEQ ID NO: 47579 - DNA, 21 bp, Homo sapiens
cagtcaccaccaatatcaaca

SEQ ID NO: 47580 - RNA, 21 nt, RNAi
gucaccaccaauaucaacauu

SEQ ID NO: 47581 - RNA, 21 nt, RNAi
uucaguggugguuauaguugu

SEQ ID NO: 47582 - DNA, 21 bp, Homo sapiens
caccaccaatatcaacatcta

SEQ ID NO: 47583 - RNA, 21 nt, RNAi
ccaccaauaucaacaucuauu

SEQ ID NO: 47584 - RNA, 21 nt, RNAi
uuggugguuauaguuguagau

SEQ ID NO: 47585 - DNA, 21 bp, Homo sapiens
caacatctaaatggtttgacc

SEQ ID NO: 47586 - RNA, 21 nt, RNAi
acaucuaaaugguuugaccuu

SEQ ID NO: 47587 - RNA, 21 nt, RNAi
uuuguagauuuaccaaacugg

SEQ ID NO: 47588 - DNA, 21 bp, Homo sapiens
caccaagcagcaataccttgg

SEQ ID NO: 47589 - RNA, 21 nt, RNAi
ccaagcagcaauaccuugguu

SEQ ID NO: 47590 - RNA, 21 nt, RNAi
uugguucgucguuauggaacc

SEQ ID NO: 47591 - DNA, 21 bp, Homo sapiens
caagcagcaataccttggatg

SEQ ID NO: 47592 - RNA, 21 nt, RNAi
agcagcaauaccuuggauguu

SEQ ID NO: 47593 - RNA, 21 nt, RNAi
uuucgucguuauggaaccuac

SEQ ID NO: 47594 - DNA, 21 bp, Homo sapiens
cagcaataccttggatgatta

SEQ ID NO: 47595 - RNA, 21 nt, RNAi
gcaauaccuuggaugauuauu

SEQ ID NO: 47596 - RNA, 21 nt, RNAi
uucguuauggaaccuacuaau

SEQ ID NO: 47597 - DNA, 21 bp, Homo sapiens
caataccttggatgattacat

SEQ ID NO: 47598 - RNA, 21 nt, RNAi
auaccuuggaugauuacauuu

SEQ ID NO: 47599 - RNA, 21 nt, RNAi
uuuauggaaccuacuaaugua

SEQ ID NO: 47600 - DNA, 21 bp, Homo sapiens
cagttgtaaagaatgactttc

SEQ ID NO: 47601 - RNA, 21 nt, RNAi
guuguaaagaaugacuuucuu

SEQ ID NO: 47602 - RNA, 21 nt, RNAi
uucaacauuucuuacugaaag

SEQ ID NO: 47603 - DNA, 21 bp, Homo sapiens
cacctgcttgtcagttgtcaa

SEQ ID NO: 47604 - RNA, 21 nt, RNAi
ccugcuugucaguugucaauu

SEQ ID NO: 47605 - RNA, 21 nt, RNAi
uuggacgaacagucaacaguu

SEQ ID NO: 47606 - DNA, 21 bp, Homo sapiens
cagttgtcaacaccttatggc

SEQ ID NO: 47607 - RNA, 21 nt, RNAi
guugucaacaccuuauggcuu

SEQ ID NO: 47608 - RNA, 21 nt, RNAi
uucaacaguuguggaauaccg

SEQ ID NO: 47609 - DNA, 21 bp, Homo sapiens
caacaccttatggccaacctg

SEQ ID NO: 47610 - RNA, 21 nt, RNAi
acaccuuauggccaaccuguu

SEQ ID NO: 47611 - RNA, 21 nt, RNAi
uuuguggaauaccgguuggac

SEQ ID NO: 47612 - DNA, 21 bp, Homo sapiens
caccttatggccaacctgcct

SEQ ID NO: 47613 - RNA, 21 nt, RNAi
ccuuauggccaaccugccuuu

SEQ ID NO: 47614 - RNA, 21 nt, RNAi
uuggaauaccgguuggacgga

SEQ ID NO: 47615 - DNA, 21 bp, Homo sapiens
caacctgcctgtttccagcag

SEQ ID NO: 47616 - RNA, 21 nt, RNAi
accugccuguuuccagcaguu

SEQ ID NO: 47617 - RNA, 21 nt, RNAi
uuuggacggacaaaggucguc

SEQ ID NO: 47618 - DNA, 21 bp, Homo sapiens
cagcagcaacagcatcaaata

SEQ ID NO: 47619 - RNA, 21 nt, RNAi
gcagcaacagcaucaaauauu

SEQ ID NO: 47620 - RNA, 21 nt, RNAi
uucgucguugucguaguuuau

SEQ ID NO: 47621 - DNA, 21 bp, Homo sapiens
cagcaacagcatcaaatactt

SEQ ID NO: 47622 - RNA, 21 nt, RNAi
gcaacagcaucaaauacuuuu

SEQ ID NO: 47623 - RNA, 21 nt, RNAi
uucguugucguaguuuaugaa

SEQ ID NO: 47624 - DNA, 21 bp, Homo sapiens
caacagcatcaaatacttgcc

SEQ ID NO: 47625 - RNA, 21 nt, RNAi
acagcaucaaauacuugccuu

SEQ ID NO: 47626 - RNA, 21 nt, RNAi
uuugucguaguuuaugaacgg

SEQ ID NO: 47627 - DNA, 21 bp, Homo sapiens
cagcatcaaatacttgccact

SEQ ID NO: 47628 - RNA, 21 nt, RNAi
gcaucaaauacuugccacuuu

SEQ ID NO: 47629 - RNA, 21 nt, RNAi
uucguaguuuaugaacgguga

SEQ ID NO: 47630 - DNA, 21 bp, Homo sapiens
catcaaatacttgccactcca

SEQ ID NO: 47631 - RNA, 21 nt, RNAi
ucaaauacuugccacuccauu

SEQ ID NO: 47632 - RNA, 21 nt, RNAi
uuaguuuaugaacggugaggu

SEQ ID NO: 47633 - DNA, 21 bp, Homo sapiens
caaatacttgccactccactt

SEQ ID NO: 47634 - RNA, 21 nt, RNAi
aauacuugccacuccacuuuu

SEQ ID NO: 47635 - RNA, 21 nt, RNAi
uuuuaugaacggugaggugaa

SEQ ID NO: 47636 - DNA, 21 bp, Homo sapiens
catcttcttcagcaaatgaat

SEQ ID NO: 47637 - RNA, 21 nt, RNAi
ucuucuucagcaaaugaauuu

SEQ ID NO: 47638 - RNA, 21 nt, RNAi
uuagaagaagucguuuacuua

SEQ ID NO: 47639 - DNA, 21 bp, Homo sapiens
cagcaaatgaatgcatttcgg

SEQ ID NO: 47640 - RNA, 21 nt, RNAi
gcaaaugaaugcauuucgguu

SEQ ID NO: 47641 - RNA, 21 nt, RNAi
uucguuuacuuacguaaagcc

SEQ ID NO: 47642 - DNA, 21 bp, Homo sapiens
caaatgaatgcatttcggtta

SEQ ID NO: 47643 - RNA, 21 nt, RNAi
aaugaaugcauuucgguuauu

SEQ ID NO: 47644 - RNA, 21 nt, RNAi
uuuuacuuacguaaagccaau

SEQ ID NO: 47645 - DNA, 21 bp, Homo sapiens
catttcggttaaaggaagaat

SEQ ID NO: 47646 - RNA, 21 nt, RNAi
uuucgguuaaaggaagaauuu

SEQ ID NO: 47647 - RNA, 21 nt, RNAi
uuaaagccaauuuccuucuua

SEQ ID NO: 47648 - DNA, 21 bp, Homo sapiens
catattaaagcagataggaag

SEQ ID NO: 47649 - RNA, 21 nt, RNAi
uauuaaagcagauaggaaguu

SEQ ID NO: 47650 - RNA, 21 nt, RNAi
uuauaauuucgucuauccuuc

SEQ ID NO: 47651 - DNA, 21 bp, Homo sapiens
cagataggaagtggaggttca

SEQ ID NO: 47652 - RNA, 21 nt, RNAi
gauaggaaguggagguucauu

SEQ ID NO: 47653 - RNA, 21 nt, RNAi
uucuauccuucaccuccaagu

SEQ ID NO: 47654 - DNA, 21 bp, Homo sapiens
caagcaaggtatttcaggtgt

SEQ ID NO: 47655 - RNA, 21 nt, RNAi
agcaagguauuucagguguuu

SEQ ID NO: 47656 - RNA, 21 nt, RNAi
uuucguuccauaaaguccaca

SEQ ID NO: 47657 - DNA, 21 bp, Homo sapiens
caaggtatttcaggtgttaaa

SEQ ID NO: 47658 - RNA, 21 nt, RNAi
agguauuucagguguuaaauu

SEQ ID NO: 47659 - RNA, 21 nt, RNAi
uuuccauaaaguccacaauuu

SEQ ID NO: 47660 - DNA, 21 bp, Homo sapiens
cagataaccaaactcttgata

SEQ ID NO: 47661 - RNA, 21 nt, RNAi
gauaaccaaacucuugauauu

SEQ ID NO: 47662 - RNA, 21 nt, RNAi
uucuauugguuugagaacuau

SEQ ID NO: 47663 - DNA, 21 bp, Homo sapiens
caaactcttgatagttaccgg

SEQ ID NO: 47664 - RNA, 21 nt, RNAi
aacucuugauaguuaccgguu

SEQ ID NO: 47665 - RNA, 21 nt, RNAi
uuuugagaacuaucaauggcc

SEQ ID NO: 47666 - DNA, 21 bp, Homo sapiens
caacaacacagtgataagatc

SEQ ID NO: 47667 - RNA, 21 nt, RNAi
acaacacagugauaagaucuu

SEQ ID NO: 47668 - RNA, 21 nt, RNAi
uuuguugugucacuauucuag

SEQ ID NO: 47669 - DNA, 21 bp, Homo sapiens
caacacagtgataagatcatc

SEQ ID NO: 47670 - RNA, 21 nt, RNAi
acacagugauaagaucaucuu

SEQ ID NO: 47671 - RNA, 21 nt, RNAi
uuugugucacuauucuaguag

SEQ ID NO: 47672 - DNA, 21 bp, Homo sapiens
cacagtgataagatcatccga

SEQ ID NO: 47673 - RNA, 21 nt, RNAi
cagugauaagaucauccgauu

SEQ ID NO: 47674 - RNA, 21 nt, RNAi
uugucacuauucuaguaggcu

SEQ ID NO: 47675 - DNA, 21 bp, Homo sapiens
cagtgataagatcatccgact

SEQ ID NO: 47676 - RNA, 21 nt, RNAi
gugauaagaucauccgacuuu

SEQ ID NO: 47677 - RNA, 21 nt, RNAi
uucacuauucuaguaggcuga

SEQ ID NO: 47678 - DNA, 21 bp, Homo sapiens
catccgactttatgattatga

SEQ ID NO: 47679 - RNA, 21 nt, RNAi
uccgacuuuaugauuaugauu

SEQ ID NO: 47680 - RNA, 21 nt, RNAi
uuaggcugaaauacuaauacu

SEQ ID NO: 47681 - DNA, 21 bp, Homo sapiens
cacggaccagtacatctacat

SEQ ID NO: 47682 - RNA, 21 nt, RNAi
cggaccaguacaucuacauuu

SEQ ID NO: 47683 - RNA, 21 nt, RNAi
uugccuggucauguagaugua

SEQ ID NO: 47684 - DNA, 21 bp, Homo sapiens
cagtacatctacatggtaatg

SEQ ID NO: 47685 - RNA, 21 nt, RNAi
guacaucuacaugguaauguu

SEQ ID NO: 47686 - RNA, 21 nt, RNAi
uucauguagauguaccauuac

SEQ ID NO: 47687 - DNA, 21 bp, Homo sapiens
catctacatggtaatggagtg

SEQ ID NO: 47688 - RNA, 21 nt, RNAi
ucuacaugguaauggaguguu

SEQ ID NO: 47689 - RNA, 21 nt, RNAi
uuagauguaccauuaccucac

SEQ ID NO: 47690 - DNA, 21 bp, Homo sapiens
catggtaatggagtgtggaaa

SEQ ID NO: 47691 - RNA, 21 nt, RNAi
ugguaauggaguguggaaauu

SEQ ID NO: 47692 - RNA, 21 nt, RNAi
uuaccauuaccucacaccuuu

SEQ ID NO: 47693 - DNA, 21 bp, Homo sapiens
cagttcacacaatccatcaac

SEQ ID NO: 47694 - RNA, 21 nt, RNAi
guucacacaauccaucaacuu

SEQ ID NO: 47695 - RNA, 21 nt, RNAi
uucaaguguguuagguaguug

SEQ ID NO: 47696 - DNA, 21 bp, Homo sapiens
cacacaatccatcaacatggc

SEQ ID NO: 47697 - RNA, 21 nt, RNAi
cacaauccaucaacauggcuu

SEQ ID NO: 47698 - RNA, 21 nt, RNAi
uuguguuagguaguuguaccg

SEQ ID NO: 47699 - DNA, 21 bp, Homo sapiens
cacaatccatcaacatggcat

SEQ ID NO: 47700 - RNA, 21 nt, RNAi
caauccaucaacauggcauuu

SEQ ID NO: 47701 - RNA, 21 nt, RNAi
uuguuagguaguuguaccgua

SEQ ID NO: 47702 - DNA, 21 bp, Homo sapiens
caatccatcaacatggcattg

SEQ ID NO: 47703 - RNA, 21 nt, RNAi
auccaucaacauggcauuguu

SEQ ID NO: 47704 - RNA, 21 nt, RNAi
uuuagguaguuguaccguaac

SEQ ID NO: 47705 - DNA, 21 bp, Homo sapiens
catcaacatggcattgttcac

SEQ ID NO: 47706 - RNA, 21 nt, RNAi
ucaacauggcauuguucacuu

SEQ ID NO: 47707 - RNA, 21 nt, RNAi
uuaguuguaccguaacaagug

SEQ ID NO: 47708 - DNA, 21 bp, Homo sapiens
caacatggcattgttcacagt

SEQ ID NO: 47709 - RNA, 21 nt, RNAi
acauggcauuguucacaguuu

SEQ ID NO: 47710 - RNA, 21 nt, RNAi
uuuguaccguaacaaguguca

SEQ ID NO: 47711 - DNA, 21 bp, Homo sapiens
catggcattgttcacagtgat

SEQ ID NO: 47712 - RNA, 21 nt, RNAi
uggcauuguucacagugauuu

SEQ ID NO: 47713 - RNA, 21 nt, RNAi
uuaccguaacaagugucacua

SEQ ID NO: 47714 - DNA, 21 bp, Homo sapiens
cattgttcacagtgatcttaa

SEQ ID NO: 47715 - RNA, 21 nt, RNAi
uuguucacagugaucuuaauu

SEQ ID NO: 47716 - RNA, 21 nt, RNAi
uuaacaagugucacuagaauu

SEQ ID NO: 47717 - DNA, 21 bp, Homo sapiens
cacagtgatcttaaaccagct

SEQ ID NO: 47718 - RNA, 21 nt, RNAi
cagugaucuuaaaccagcuuu

SEQ ID NO: 47719 - RNA, 21 nt, RNAi
uugucacuagaauuuggucga

SEQ ID NO: 47720 - DNA, 21 bp, Homo sapiens
cagtgatcttaaaccagctaa

SEQ ID NO: 47721 - RNA, 21 nt, RNAi
gugaucuuaaaccagcuaauu

SEQ ID NO: 47722 - RNA, 21 nt, RNAi
uucacuagaauuuggucgauu

SEQ ID NO: 47723 - DNA, 21 bp, Homo sapiens
cagctaactttctgatagttg

SEQ ID NO: 47724 - RNA, 21 nt, RNAi
gcuaacuuucugauaguuguu

SEQ ID NO: 47725 - RNA, 21 nt, RNAi
uucgauugaaagacuaucaac

SEQ ID NO: 47726 - DNA, 21 bp, Homo sapiens
caaaccaaatgcaaccagata

SEQ ID NO: 47727 - RNA, 21 nt, RNAi
aaccaaaugcaaccagauauu

SEQ ID NO: 47728 - RNA, 21 nt, RNAi
uuuugguuuacguuggucuau

SEQ ID NO: 47729 - DNA, 21 bp, Homo sapiens
caaatgcaaccagatacaaca

SEQ ID NO: 47730 - RNA, 21 nt, RNAi
aaugcaaccagauacaacauu

SEQ ID NO: 47731 - RNA, 21 nt, RNAi
uuuuacguuggucuauguugu

SEQ ID NO: 47732 - DNA, 21 bp, Homo sapiens
caaccagatacaacaagtgtt

SEQ ID NO: 47733 - RNA, 21 nt, RNAi
accagauacaacaaguguuuu

SEQ ID NO: 47734 - RNA, 21 nt, RNAi
uuuggucuauguuguucacaa

SEQ ID NO: 47735 - DNA, 21 bp, Homo sapiens
cagatacaacaagtgttgtta

SEQ ID NO: 47736 - RNA, 21 nt, RNAi
gauacaacaaguguuguuauu

SEQ ID NO: 47737 - RNA, 21 nt, RNAi
uucuauguuguucacaacaau

SEQ ID NO: 47738 - DNA, 21 bp, Homo sapiens
caagtgttgttaaagattctc

SEQ ID NO: 47739 - RNA, 21 nt, RNAi
aguguuguuaaagauucucuu

SEQ ID NO: 47740 - RNA, 21 nt, RNAi
uuucacaacaauuucuaagag

SEQ ID NO: 47741 - DNA, 21 bp, Homo sapiens
caggttggcacagttaattat

SEQ ID NO: 47742 - RNA, 21 nt, RNAi
gguuggcacaguuaauuauuu

SEQ ID NO: 47743 - RNA, 21 nt, RNAi
uuccaaccgugucaauuaaua

SEQ ID NO: 47744 - DNA, 21 bp, Homo sapiens
cacagttaattatatgccacc

SEQ ID NO: 47745 - RNA, 21 nt, RNAi
caguuaauuauaugccaccuu

SEQ ID NO: 47746 - RNA, 21 nt, RNAi
uugucaauuaauauacggugg

SEQ ID NO: 47747 - DNA, 21 bp, Homo sapiens
cagttaattatatgccaccag

SEQ ID NO: 47748 - RNA, 21 nt, RNAi
guuaauuauaugccaccaguu

SEQ ID NO: 47749 - RNA, 21 nt, RNAi
uucaauuaauauacggugguc

SEQ ID NO: 47750 - DNA, 21 bp, Homo sapiens
caccagaagcaatcaaagata

SEQ ID NO: 47751 - RNA, 21 nt, RNAi
ccagaagcaaucaaagauauu

SEQ ID NO: 47752 - RNA, 21 nt, RNAi
uuggucuucguuaguuucuau

SEQ ID NO: 47753 - DNA, 21 bp, Homo sapiens
cagaagcaatcaaagatatgt

SEQ ID NO: 47754 - RNA, 21 nt, RNAi
gaagcaaucaaagauauguuu

SEQ ID NO: 47755 - RNA, 21 nt, RNAi
uucuucguuaguuucuauaca

SEQ ID NO: 47756 - DNA, 21 bp, Homo sapiens
caatcaaagatatgtcttcct

SEQ ID NO: 47757 - RNA, 21 nt, RNAi
aucaaagauaugucuuccuuu

SEQ ID NO: 47758 - RNA, 21 nt, RNAi
uuuaguuucuauacagaagga

SEQ ID NO: 47759 - DNA, 21 bp, Homo sapiens
caaagatatgtcttcctccag

SEQ ID NO: 47760 - RNA, 21 nt, RNAi
aagauaugucuuccuccaguu

SEQ ID NO: 47761 - RNA, 21 nt, RNAi
uuuucuauacagaaggagguc

SEQ ID NO: 47762 - DNA, 21 bp, Homo sapiens
caccatttcagcagataatta

SEQ ID NO: 47763 - RNA, 21 nt, RNAi
ccauuucagcagauaauuauu

SEQ ID NO: 47764 - RNA, 21 nt, RNAi
uugguaaagucgucuauuaau

SEQ ID NO: 47765 - DNA, 21 bp, Homo sapiens
cagatttctaaattacatgcc

SEQ ID NO: 47766 - RNA, 21 nt, RNAi
gauuucuaaauuacaugccuu

SEQ ID NO: 47767 - RNA, 21 nt, RNAi
uucuaaagauuuaauguacgg

SEQ ID NO: 47768 - DNA, 21 bp, Homo sapiens
catgccataattgatcctaat

SEQ ID NO: 47769 - RNA, 21 nt, RNAi
ugccauaauugauccuaauuu

SEQ ID NO: 47770 - RNA, 21 nt, RNAi
uuacgguauuaacuaggauua

SEQ ID NO: 47771 - DNA, 21 bp, Homo sapiens
cagagaaagatcttcaagatg

SEQ ID NO: 47772 - RNA, 21 nt, RNAi
gagaaagaucuucaagauguu

SEQ ID NO: 47773 - RNA, 21 nt, RNAi
uucucuuucuagaaguucuac

SEQ ID NO: 47774 - DNA, 21 bp, Homo sapiens
caagatgtgttaaagtgttgt

SEQ ID NO: 47775 - RNA, 21 nt, RNAi
agauguguuaaaguguuguuu

SEQ ID NO: 47776 - RNA, 21 nt, RNAi
uuucuacacaauuucacaaca

SEQ ID NO: 47777 - DNA, 21 bp, Homo sapiens
cagaggatatccattcctgag

SEQ ID NO: 47778 - RNA, 21 nt, RNAi
gaggauauccauuccugaguu

SEQ ID NO: 47779 - RNA, 21 nt, RNAi
uucuccuauagguaaggacuc

SEQ ID NO: 47780 - DNA, 21 bp, Homo sapiens
cattcctgagctcctggctca

SEQ ID NO: 47781 - RNA, 21 nt, RNAi
uuccugagcuccuggcucauu

SEQ ID NO: 47782 - RNA, 21 nt, RNAi
uuaaggacucgaggaccgagu

SEQ ID NO: 47783 - DNA, 21 bp, Homo sapiens
caaattcaaactcatccagtt

SEQ ID NO: 47784 - RNA, 21 nt, RNAi
aauucaaacucauccaguuuu

SEQ ID NO: 47785 - RNA, 21 nt, RNAi
uuuuaaguuugaguaggucaa

SEQ ID NO: 47786 - DNA, 21 bp, Homo sapiens
caaactcatccagttaaccaa

SEQ ID NO: 47787 - RNA, 21 nt, RNAi
aacucauccaguuaaccaauu

SEQ ID NO: 47788 - RNA, 21 nt, RNAi
uuuugaguaggucaauugguu

SEQ ID NO: 47789 - DNA, 21 bp, Homo sapiens
catccagttaaccaaatggcc

SEQ ID NO: 47790 - RNA, 21 nt, RNAi
uccaguuaaccaaauggccuu

SEQ ID NO: 47791 - RNA, 21 nt, RNAi
uuaggucaauugguuuaccgg

SEQ ID NO: 47792 - DNA, 21 bp, Homo sapiens
cagttaaccaaatggccaagg

SEQ ID NO: 47793 - RNA, 21 nt, RNAi
guuaaccaaauggccaagguu

SEQ ID NO: 47794 - RNA, 21 nt, RNAi
uucaauugguuuaccgguucc

SEQ ID NO: 47795 - DNA, 21 bp, Homo sapiens
caacttgttggtctgaattct

SEQ ID NO: 47796 - RNA, 21 nt, RNAi
acuuguuggucugaauucuuu

SEQ ID NO: 47797 - RNA, 21 nt, RNAi
uuugaacaaccagacuuaaga

SEQ ID NO: 47798 - DNA, 21 bp, Homo sapiens
cactatagtggtggtgaaagt

SEQ ID NO: 47799 - RNA, 21 nt, RNAi
cuauagugguggugaaaguuu

SEQ ID NO: 47800 - RNA, 21 nt, RNAi
uugauaucaccaccacuuuca

SEQ ID NO: 47801 - DNA, 21 bp, Homo sapiens
cataattcttcatcctccaag

SEQ ID NO: 47802 - RNA, 21 nt, RNAi
uaauucuucauccuccaaguu

SEQ ID NO: 47803 - RNA, 21 nt, RNAi
uuauuaagaaguaggagguuc

SEQ ID NO: 47804 - DNA, 21 bp, Homo sapiens
cagttattcgtaatgtcagat

SEQ ID NO: 47805 - RNA, 21 nt, RNAi
guuauucguaaugucagauuu

SEQ ID NO: 47806 - RNA, 21 nt, RNAi
uucaauaagcauuacagucua

SEQ ID NO: 47807 - DNA, 21 bp, Homo sapiens
catttgaagacaacatcactc

SEQ ID NO: 47808 - RNA, 21 nt, RNAi
uuugaagacaacaucacucuu

SEQ ID NO: 47809 - RNA, 21 nt, RNAi
uuaaacuucuguuguagugag

SEQ ID NO: 47810 - DNA, 21 bp, Homo sapiens
caacatcactctgaagtgtta

SEQ ID NO: 47811 - RNA, 21 nt, RNAi
acaucacucugaaguguuauu

SEQ ID NO: 47812 - RNA, 21 nt, RNAi
uuuguagugagacuucacaau

SEQ ID NO: 47813 - DNA, 21 bp, Homo sapiens
catcactctgaagtgttatca

SEQ ID NO: 47814 - RNA, 21 nt, RNAi
ucacucugaaguguuaucauu

SEQ ID NO: 47815 - RNA, 21 nt, RNAi
uuagugagacuucacaauagu

SEQ ID NO: 47816 - DNA, 21 bp, Homo sapiens
cactctgaagtgttatcagca

SEQ ID NO: 47817 - RNA, 21 nt, RNAi
cucugaaguguuaucagcauu

SEQ ID NO: 47818 - RNA, 21 nt, RNAi
uugagacuucacaauagucgu

SEQ ID NO: 47819 - DNA, 21 bp, Homo sapiens
caaccacttatggcactgtat

SEQ ID NO: 47820 - RNA, 21 nt, RNAi
accacuuauggcacuguauuu

SEQ ID NO: 47821 - RNA, 21 nt, RNAi
uuuggugaauaccgugacaua

SEQ ID NO: 47822 - DNA, 21 bp, Homo sapiens
cacttatggcactgtatatat

SEQ ID NO: 47823 - RNA, 21 nt, RNAi
cuuauggcacuguauauauuu

SEQ ID NO: 47824 - RNA, 21 nt, RNAi
uugaauaccgugacauauaua

SEQ ID NO: 47825 - DNA, 21 bp, Homo sapiens
gaaatggaatccgaggattta

SEQ ID NO: 47826 - RNA, 21 nt, RNAi
aauggaauccgaggauuuauu

SEQ ID NO: 47827 - RNA, 21 nt, RNAi
uuuuaccuuaggcuccuaaau

SEQ ID NO: 47828 - DNA, 21 bp, Homo sapiens
gaatccgaggatttaagtggc

SEQ ID NO: 47829 - RNA, 21 nt, RNAi
auccgaggauuuaaguggcuu

SEQ ID NO: 47830 - RNA, 21 nt, RNAi
uuuaggcuccuaaauucaccg

SEQ ID NO: 47831 - DNA, 21 bp, Homo sapiens
gaggatttaagtggcagagaa

SEQ ID NO: 47832 - RNA, 21 nt, RNAi
ggauuuaaguggcagagaauu

SEQ ID NO: 47833 - RNA, 21 nt, RNAi
uuccuaaauucaccgucucuu

SEQ ID NO: 47834 - DNA, 21 bp, Homo sapiens
gatttaagtggcagagaattg

SEQ ID NO: 47835 - RNA, 21 nt, RNAi
uuuaaguggcagagaauuguu

SEQ ID NO: 47836 - RNA, 21 nt, RNAi
uuaaauucaccgucucuuaac

SEQ ID NO: 47837 - DNA, 21 bp, Homo sapiens
gagaattgacaattgattcca

SEQ ID NO: 47838 - RNA, 21 nt, RNAi
gaauugacaauugauuccauu

SEQ ID NO: 47839 - RNA, 21 nt, RNAi
uucuuaacuguuaacuaaggu

SEQ ID NO: 47840 - DNA, 21 bp, Homo sapiens
gattccataatgaacaaagtg

SEQ ID NO: 47841 - RNA, 21 nt, RNAi
uuccauaaugaacaaaguguu

SEQ ID NO: 47842 - RNA, 21 nt, RNAi
uuaagguauuacuuguuucac

SEQ ID NO: 47843 - DNA, 21 bp, Homo sapiens
gaacaaagtgagagacattaa

SEQ ID NO: 47844 - RNA, 21 nt, RNAi
acaaagugagagacauuaauu

SEQ ID NO: 47845 - RNA, 21 nt, RNAi
uuuguuucacucucuguaauu

SEQ ID NO: 47846 - DNA, 21 bp, Homo sapiens
gaagaccttactgatgaacta

SEQ ID NO: 47847 - RNA, 21 nt, RNAi
agaccuuacugaugaacuauu

SEQ ID NO: 47848 - RNA, 21 nt, RNAi
uuucuggaaugacuacuugau

SEQ ID NO: 47849 - DNA, 21 bp, Homo sapiens
gaccttactgatgaactaagc

SEQ ID NO: 47850 - RNA, 21 nt, RNAi
ccuuacugaugaacuaagcuu

SEQ ID NO: 47851 - RNA, 21 nt, RNAi
uuggaaugacuacuugauucg

SEQ ID NO: 47852 - DNA, 21 bp, Homo sapiens
gaggactggttgagtttgttg

SEQ ID NO: 47853 - RNA, 21 nt, RNAi
ggacugguugaguuuguuguu

SEQ ID NO: 47854 - RNA, 21 nt, RNAi
uuccugaccaacucaaacaac

SEQ ID NO: 47855 - DNA, 21 bp, Homo sapiens
gactggttgagtttgttgctc

SEQ ID NO: 47856 - RNA, 21 nt, RNAi
cugguugaguuuguugcucuu

SEQ ID NO: 47857 - RNA, 21 nt, RNAi
uugaccaacucaaacaacgag

SEQ ID NO: 47858 - DNA, 21 bp, Homo sapiens
gagtttgttgctcaaactaga

SEQ ID NO: 47859 - RNA, 21 nt, RNAi
guuuguugcucaaacuagauu

SEQ ID NO: 47860 - RNA, 21 nt, RNAi
uucaaacaacgaguuugaucu

SEQ ID NO: 47861 - DNA, 21 bp, Homo sapiens
gattggtcgttacagtcaagc

SEQ ID NO: 47862 - RNA, 21 nt, RNAi
uuggucguuacagucaagcuu

SEQ ID NO: 47863 - RNA, 21 nt, RNAi
uuaaccagcaaugucaguucg

SEQ ID NO: 47864 - DNA, 21 bp, Homo sapiens
gaattcaagtgagatttgctg

SEQ ID NO: 47865 - RNA, 21 nt, RNAi
auucaagugagauuugcuguu

SEQ ID NO: 47866 - RNA, 21 nt, RNAi
uuuaaguucacucuaaacgac

SEQ ID NO: 47867 - DNA, 21 bp, Homo sapiens
gagccagatgatgcacgtgac

SEQ ID NO: 47868 - RNA, 21 nt, RNAi
gccagaugaugcacgugacuu

SEQ ID NO: 47869 - RNA, 21 nt, RNAi
uucggucuacuacgugcacug

SEQ ID NO: 47870 - DNA, 21 bp, Homo sapiens
gatgatgcacgtgactacttt

SEQ ID NO: 47871 - RNA, 21 nt, RNAi
ugaugcacgugacuacuuuuu

SEQ ID NO: 47872 - RNA, 21 nt, RNAi
uuacuacgugcacugaugaaa

SEQ ID NO: 47873 - DNA, 21 bp, Homo sapiens
gatgcacgtgactactttcaa

SEQ ID NO: 47874 - RNA, 21 nt, RNAi
ugcacgugacuacuuucaauu

SEQ ID NO: 47875 - RNA, 21 nt, RNAi
uuacgugcacugaugaaaguu

SEQ ID NO: 47876 - DNA, 21 bp, Homo sapiens
gactactttcaaatggccaga

SEQ ID NO: 47877 - RNA, 21 nt, RNAi
cuacuuucaaauggccagauu

SEQ ID NO: 47878 - RNA, 21 nt, RNAi
uugaugaaaguuuaccggucu

SEQ ID NO: 47879 - DNA, 21 bp, Homo sapiens
gagcaaactgcaagaaatttg

SEQ ID NO: 47880 - RNA, 21 nt, RNAi
gcaaacugcaagaaauuuguu

SEQ ID NO: 47881 - RNA, 21 nt, RNAi
uucguuugacguucuuuaaac

SEQ ID NO: 47882 - DNA, 21 bp, Homo sapiens
gaactgtcacaaggtaatgtc

SEQ ID NO: 47883 - RNA, 21 nt, RNAi
acugucacaagguaaugucuu

SEQ ID NO: 47884 - RNA, 21 nt, RNAi
uuugacaguguuccauuacag

SEQ ID NO: 47885 - DNA, 21 bp, Homo sapiens
gaacgtggagcagtaccacta

SEQ ID NO: 47886 - RNA, 21 nt, RNAi
acguggagcaguaccacuauu

SEQ ID NO: 47887 - RNA, 21 nt, RNAi
uuugcaccucgucauggugau

SEQ ID NO: 47888 - DNA, 21 bp, Homo sapiens
gagcagtaccactagaaatgc

SEQ ID NO: 47889 - RNA, 21 nt, RNAi
gcaguaccacuagaaaugcuu

SEQ ID NO: 47890 - RNA, 21 nt, RNAi
uucgucauggugaucuuuacg

SEQ ID NO: 47891 - DNA, 21 bp, Homo sapiens
gaagaatttatcagcatctac

SEQ ID NO: 47892 - RNA, 21 nt, RNAi
agaauuuaucagcaucuacuu

SEQ ID NO: 47893 - RNA, 21 nt, RNAi
uuucuuaaauagucguagaug

SEQ ID NO: 47894 - DNA, 21 bp, Homo sapiens
gaatttatcagcatctacggt

SEQ ID NO: 47895 - RNA, 21 nt, RNAi
auuuaucagcaucuacgguuu

SEQ ID NO: 47896 - RNA, 21 nt, RNAi
uuuaaauagucguagaugcca

SEQ ID NO: 47897 - DNA, 21 bp, Homo sapiens
gaataggaacaacagttgtga

SEQ ID NO: 47898 - RNA, 21 nt, RNAi
auaggaacaacaguugugauu

SEQ ID NO: 47899 - RNA, 21 nt, RNAi
uuuauccuuguugucaacacu

SEQ ID NO: 47900 - DNA, 21 bp, Homo sapiens
gaacaacagttgtgattccag

SEQ ID NO: 47901 - RNA, 21 nt, RNAi
acaacaguugugauuccaguu

SEQ ID NO: 47902 - RNA, 21 nt, RNAi
uuuguugucaacacuaagguc

SEQ ID NO: 47903 - DNA, 21 bp, Homo sapiens
gattccagaggacagactact

SEQ ID NO: 47904 - RNA, 21 nt, RNAi
uuccagaggacagacuacuuu

SEQ ID NO: 47905 - RNA, 21 nt, RNAi
uuaaggucuccugucugauga

SEQ ID NO: 47906 - DNA, 21 bp, Homo sapiens
gaggacagactactaaagcca

SEQ ID NO: 47907 - RNA, 21 nt, RNAi
ggacagacuacuaaagccauu

SEQ ID NO: 47908 - RNA, 21 nt, RNAi
uuccugucugaugauuucggu

SEQ ID NO: 47909 - DNA, 21 bp, Homo sapiens
gacagactactaaagccaggt

SEQ ID NO: 47910 - RNA, 21 nt, RNAi
cagacuacuaaagccagguuu

SEQ ID NO: 47911 - RNA, 21 nt, RNAi
uugucugaugauuucggucca

SEQ ID NO: 47912 - DNA, 21 bp, Homo sapiens
gagagaacatgccaccacaag

SEQ ID NO: 47913 - RNA, 21 nt, RNAi
gagaacaugccaccacaaguu

SEQ ID NO: 47914 - RNA, 21 nt, RNAi
uucucuuguacggugguguuc

SEQ ID NO: 47915 - DNA, 21 bp, Homo sapiens
gagaacatgccaccacaagat

SEQ ID NO: 47916 - RNA, 21 nt, RNAi
gaacaugccaccacaagauuu

SEQ ID NO: 47917 - RNA, 21 nt, RNAi
uucuuguacggugguguucua

SEQ ID NO: 47918 - DNA, 21 bp, Homo sapiens
gaacatgccaccacaagatgc

SEQ ID NO: 47919 - RNA, 21 nt, RNAi
acaugccaccacaagaugcuu

SEQ ID NO: 47920 - RNA, 21 nt, RNAi
uuuguacggugguguucuacg

SEQ ID NO: 47921 - DNA, 21 bp, Homo sapiens
gatgcagaaataggttaccgg

SEQ ID NO: 47922 - RNA, 21 nt, RNAi
ugcagaaauagguuaccgguu

SEQ ID NO: 47923 - RNA, 21 nt, RNAi
uuacgucuuuauccaauggcc

SEQ ID NO: 47924 - DNA, 21 bp, Homo sapiens
gaaataggttaccggaattca

SEQ ID NO: 47925 - RNA, 21 nt, RNAi
aauagguuaccggaauucauu

SEQ ID NO: 47926 - RNA, 21 nt, RNAi
uuuuauccaauggccuuaagu

SEQ ID NO: 47927 - DNA, 21 bp, Homo sapiens
gattgtgatgtgaagacagat

SEQ ID NO: 47928 - RNA, 21 nt, RNAi
uugugaugugaagacagauuu

SEQ ID NO: 47929 - RNA, 21 nt, RNAi
uuaacacuacacuucugucua

SEQ ID NO: 47930 - DNA, 21 bp, Homo sapiens
gatgtgaagacagatgattca

SEQ ID NO: 47931 - RNA, 21 nt, RNAi
ugugaagacagaugauucauu

SEQ ID NO: 47932 - RNA, 21 nt, RNAi
uuacacuucugucuacuaagu

SEQ ID NO: 47933 - DNA, 21 bp, Homo sapiens
gaagacagatgattcagttgt

SEQ ID NO: 47934 - RNA, 21 nt, RNAi
agacagaugauucaguuguuu

SEQ ID NO: 47935 - RNA, 21 nt, RNAi
uuucugucuacuaagucaaca

SEQ ID NO: 47936 - DNA, 21 bp, Homo sapiens
gacagatgattcagttgtacc

SEQ ID NO: 47937 - RNA, 21 nt, RNAi
cagaugauucaguuguaccuu

SEQ ID NO: 47938 - RNA, 21 nt, RNAi
uugucuacuaagucaacaugg

SEQ ID NO: 47939 - DNA, 21 bp, Homo sapiens
gatgattcagttgtaccttgt

SEQ ID NO: 47940 - RNA, 21 nt, RNAi
ugauucaguuguaccuuguuu

SEQ ID NO: 47941 - RNA, 21 nt, RNAi
uuacuaagucaacauggaaca

SEQ ID NO: 47942 - DNA, 21 bp, Homo sapiens
gacaaacctctagatcagaat

SEQ ID NO: 47943 - RNA, 21 nt, RNAi
caaaccucuagaucagaauuu

SEQ ID NO: 47944 - RNA, 21 nt, RNAi
uuguuuggagaucuagucuua

SEQ ID NO: 47945 - DNA, 21 bp, Homo sapiens
gatcagaatgccgagatttgg

SEQ ID NO: 47946 - RNA, 21 nt, RNAi
ucagaaugccgagauuugguu

SEQ ID NO: 47947 - RNA, 21 nt, RNAi
uuagucuuacggcucuaaacc

SEQ ID NO: 47948 - DNA, 21 bp, Homo sapiens
gaatgccgagatttggttgtg

SEQ ID NO: 47949 - RNA, 21 nt, RNAi
augccgagauuugguuguguu

SEQ ID NO: 47950 - RNA, 21 nt, RNAi
uuuacggcucuaaaccaacac

SEQ ID NO: 47951 - DNA, 21 bp, Homo sapiens
gagatttggttgtgcctggat

SEQ ID NO: 47952 - RNA, 21 nt, RNAi
gauuugguugugccuggauuu

SEQ ID NO: 47953 - RNA, 21 nt, RNAi
uucuaaaccaacacggaccua

SEQ ID NO: 47954 - DNA, 21 bp, Homo sapiens
gatttggttgtgcctggatct

SEQ ID NO: 47955 - RNA, 21 nt, RNAi
uuugguugugccuggaucuuu

SEQ ID NO: 47956 - RNA, 21 nt, RNAi
uuaaaccaacacggaccuaga

SEQ ID NO: 47957 - DNA, 21 bp, Homo sapiens
gatctaaaccaagtggaaatg

SEQ ID NO: 47958 - RNA, 21 nt, RNAi
ucuaaaccaaguggaaauguu

SEQ ID NO: 47959 - RNA, 21 nt, RNAi
uuagauuugguucaccuuuac

SEQ ID NO: 47960 - DNA, 21 bp, Homo sapiens
gaacctctggtgtcagatgaa

SEQ ID NO: 47961 - RNA, 21 nt, RNAi
accucuggugucagaugaauu

SEQ ID NO: 47962 - RNA, 21 nt, RNAi
uuuggagaccacagucuacuu

SEQ ID NO: 47963 - DNA, 21 bp, Homo sapiens
gaatcaagtcttctagctaaa

SEQ ID NO: 47964 - RNA, 21 nt, RNAi
aucaagucuucuagcuaaauu

SEQ ID NO: 47965 - RNA, 21 nt, RNAi
uuuaguucagaagaucgauuu

SEQ ID NO: 47966 - DNA, 21 bp, Homo sapiens
gagtatcaagaaccagaggtt

SEQ ID NO: 47967 - RNA, 21 nt, RNAi
guaucaagaaccagagguuuu

SEQ ID NO: 47968 - RNA, 21 nt, RNAi
uucauaguucuuggucuccaa

SEQ ID NO: 47969 - DNA, 21 bp, Homo sapiens
gaaccagaggttccagagagt

SEQ ID NO: 47970 - RNA, 21 nt, RNAi
accagagguuccagagaguuu

SEQ ID NO: 47971 - RNA, 21 nt, RNAi
uuuggucuccaaggucucuca

SEQ ID NO: 47972 - DNA, 21 bp, Homo sapiens
gaggttccagagagtaaccag

SEQ ID NO: 47973 - RNA, 21 nt, RNAi
gguuccagagaguaaccaguu

SEQ ID NO: 47974 - RNA, 21 nt, RNAi
uuccaaggucucucauugguc

SEQ ID NO: 47975 - DNA, 21 bp, Homo sapiens
gagagtaaccagaaacagtgg

SEQ ID NO: 47976 - RNA, 21 nt, RNAi
gaguaaccagaaacagugguu

SEQ ID NO: 47977 - RNA, 21 nt, RNAi
uucucauuggucuuugucacc

SEQ ID NO: 47978 - DNA, 21 bp, Homo sapiens
gagtaaccagaaacagtggca

SEQ ID NO: 47979 - RNA, 21 nt, RNAi
guaaccagaaacaguggcauu

SEQ ID NO: 47980 - RNA, 21 nt, RNAi
uucauuggucuuugucaccgu

SEQ ID NO: 47981 - DNA, 21 bp, Homo sapiens
gaaacagtggcaatctaagag

SEQ ID NO: 47982 - RNA, 21 nt, RNAi
aacaguggcaaucuaagaguu

SEQ ID NO: 47983 - RNA, 21 nt, RNAi
uuuugucaccguuagauucuc

SEQ ID NO: 47984 - DNA, 21 bp, Homo sapiens
gagaaagtcagagtgtattaa

SEQ ID NO: 47985 - RNA, 21 nt, RNAi
gaaagucagaguguauuaauu

SEQ ID NO: 47986 - RNA, 21 nt, RNAi
uucuuucagucucacauaauu

SEQ ID NO: 47987 - DNA, 21 bp, Homo sapiens
gaaagtcagagtgtattaacc

SEQ ID NO: 47988 - RNA, 21 nt, RNAi
aagucagaguguauuaaccuu

SEQ ID NO: 47989 - RNA, 21 nt, RNAi
uuuucagucucacauaauugg

SEQ ID NO: 47990 - DNA, 21 bp, Homo sapiens
gagtgtattaaccagaatcct

SEQ ID NO: 47991 - RNA, 21 nt, RNAi
guguauuaaccagaauccuuu

SEQ ID NO: 47992 - RNA, 21 nt, RNAi
uucacauaauuggucuuagga

SEQ ID NO: 47993 - DNA, 21 bp, Homo sapiens
gaatcctgctgcatcttcaaa

SEQ ID NO: 47994 - RNA, 21 nt, RNAi
auccugcugcaucuucaaauu

SEQ ID NO: 47995 - RNA, 21 nt, RNAi
uuuaggacgacguagaaguuu

SEQ ID NO: 47996 - DNA, 21 bp, Homo sapiens
gacaccaagcagcaatacctt

SEQ ID NO: 47997 - RNA, 21 nt, RNAi
caccaagcagcaauaccuuuu

SEQ ID NO: 47998 - RNA, 21 nt, RNAi
uugugguucgucguuauggaa

SEQ ID NO: 47999 - DNA, 21 bp, Homo sapiens
gaactccagttgtaaagaatg

SEQ ID NO: 48000 - RNA, 21 nt, RNAi
acuccaguuguaaagaauguu

SEQ ID NO: 48001 - RNA, 21 nt, RNAi
uuugaggucaacauuucuuac

SEQ ID NO: 48002 - DNA, 21 bp, Homo sapiens
gaatgactttccacctgcttg

SEQ ID NO: 48003 - RNA, 21 nt, RNAi
augacuuuccaccugcuuguu

SEQ ID NO: 48004 - RNA, 21 nt, RNAi
uuuacugaaagguggacgaac

SEQ ID NO: 48005 - DNA, 21 bp, Homo sapiens
gactttccacctgcttgtcag

SEQ ID NO: 48006 - RNA, 21 nt, RNAi
cuuuccaccugcuugucaguu

SEQ ID NO: 48007 - RNA, 21 nt, RNAi
uugaaagguggacgaacaguc

SEQ ID NO: 48008 - DNA, 21 bp, Homo sapiens
gaatgcatttcggttaaagga

SEQ ID NO: 48009 - RNA, 21 nt, RNAi
augcauuucgguuaaaggauu

SEQ ID NO: 48010 - RNA, 21 nt, RNAi
uuuacguaaagccaauuuccu

SEQ ID NO: 48011 - DNA, 21 bp, Homo sapiens
gataggaagtggaggttcaag

SEQ ID NO: 48012 - RNA, 21 nt, RNAi
uaggaaguggagguucaaguu

SEQ ID NO: 48013 - RNA, 21 nt, RNAi
uuauccuucaccuccaaguuc

SEQ ID NO: 48014 - DNA, 21 bp, Homo sapiens
gaagtggaggttcaagcaagg

SEQ ID NO: 48015 - RNA, 21 nt, RNAi
aguggagguucaagcaagguu

SEQ ID NO: 48016 - RNA, 21 nt, RNAi
uuucaccuccaaguucguucc

SEQ ID NO: 48017 - DNA, 21 bp, Homo sapiens
gaggttcaagcaaggtatttc

SEQ ID NO: 48018 - RNA, 21 nt, RNAi
gguucaagcaagguauuucuu

SEQ ID NO: 48019 - RNA, 21 nt, RNAi
uuccaaguucguuccauaaag

SEQ ID NO: 48020 - DNA, 21 bp, Homo sapiens
gaacttagaagaagcagataa

SEQ ID NO: 48021 - RNA, 21 nt, RNAi
acuuagaagaagcagauaauu

SEQ ID NO: 48022 - RNA, 21 nt, RNAi
uuugaaucuucuucgucuauu

SEQ ID NO: 48023 - DNA, 21 bp, Homo sapiens
gaagaagcagataaccaaact

SEQ ID NO: 48024 - RNA, 21 nt, RNAi
agaagcagauaaccaaacuuu

SEQ ID NO: 48025 - RNA, 21 nt, RNAi
uuucuucgucuauugguuuga

SEQ ID NO: 48026 - DNA, 21 bp, Homo sapiens
gaagcagataaccaaactctt

SEQ ID NO: 48027 - RNA, 21 nt, RNAi
agcagauaaccaaacucuuuu

SEQ ID NO: 48028 - RNA, 21 nt, RNAi
uuucgucuauugguuugagaa

SEQ ID NO: 48029 - DNA, 21 bp, Homo sapiens
gataaccaaactcttgatagt

SEQ ID NO: 48030 - RNA, 21 nt, RNAi
uaaccaaacucuugauaguuu

SEQ ID NO: 48031 - RNA, 21 nt, RNAi
uuauugguuugagaacuauca

SEQ ID NO: 48032 - DNA, 21 bp, Homo sapiens
gatagttaccggaacgaaata

SEQ ID NO: 48033 - RNA, 21 nt, RNAi
uaguuaccggaacgaaauauu

SEQ ID NO: 48034 - RNA, 21 nt, RNAi
uuaucaauggccuugcuuuau

SEQ ID NO: 48035 - DNA, 21 bp, Homo sapiens
gaataaactacaacaacacag

SEQ ID NO: 48036 - RNA, 21 nt, RNAi
auaaacuacaacaacacaguu

SEQ ID NO: 48037 - RNA, 21 nt, RNAi
uuuauuugauguuguuguguc

SEQ ID NO: 48038 - DNA, 21 bp, Homo sapiens
gataagatcatccgactttat

SEQ ID NO: 48039 - RNA, 21 nt, RNAi
uaagaucauccgacuuuauuu

SEQ ID NO: 48040 - RNA, 21 nt, RNAi
uuauucuaguaggcugaaaua

SEQ ID NO: 48041 - DNA, 21 bp, Homo sapiens
gatcatccgactttatgatta

SEQ ID NO: 48042 - RNA, 21 nt, RNAi
ucauccgacuuuaugauuauu

SEQ ID NO: 48043 - RNA, 21 nt, RNAi
uuaguaggcugaaauacuaau

SEQ ID NO: 48044 - DNA, 21 bp, Homo sapiens
gattatgaaatcacggaccag

SEQ ID NO: 48045 - RNA, 21 nt, RNAi
uuaugaaaucacggaccaguu

SEQ ID NO: 48046 - RNA, 21 nt, RNAi
uuaauacuuuagugccugguc

SEQ ID NO: 48047 - DNA, 21 bp, Homo sapiens
gaaatcacggaccagtacatc

SEQ ID NO: 48048 - RNA, 21 nt, RNAi
aaucacggaccaguacaucuu

SEQ ID NO: 48049 - RNA, 21 nt, RNAi
uuuuagugccuggucauguag

SEQ ID NO: 48050 - DNA, 21 bp, Homo sapiens
gaccagtacatctacatggta

SEQ ID NO: 48051 - RNA, 21 nt, RNAi
ccaguacaucuacaugguauu

SEQ ID NO: 48052 - RNA, 21 nt, RNAi
uuggucauguagauguaccau

SEQ ID NO: 48053 - DNA, 21 bp, Homo sapiens
gagtgtggaaatattgatctt

SEQ ID NO: 48054 - RNA, 21 nt, RNAi
guguggaaauauugaucuuuu

SEQ ID NO: 48055 - RNA, 21 nt, RNAi
uucacaccuuuauaacuagaa

SEQ ID NO: 48056 - DNA, 21 bp, Homo sapiens
gaacgcaagagttactggaaa

SEQ ID NO: 48057 - RNA, 21 nt, RNAi
acgcaagaguuacuggaaauu

SEQ ID NO: 48058 - RNA, 21 nt, RNAi
uuugcguucucaaugaccuuu

SEQ ID NO: 48059 - DNA, 21 bp, Homo sapiens
gaggcagttcacacaatccat

SEQ ID NO: 48060 - RNA, 21 nt, RNAi
ggcaguucacacaauccauuu

SEQ ID NO: 48061 - RNA, 21 nt, RNAi
uuccgucaaguguguuaggua

SEQ ID NO: 48062 - DNA, 21 bp, Homo sapiens
gatcttaaaccagctaacttt

SEQ ID NO: 48063 - RNA, 21 nt, RNAi
ucuuaaaccagcuaacuuuuu

SEQ ID NO: 48064 - RNA, 21 nt, RNAi
uuagaauuuggucgauugaaa

SEQ ID NO: 48065 - DNA, 21 bp, Homo sapiens
gatagttgatggaatgctaaa

SEQ ID NO: 48066 - RNA, 21 nt, RNAi
uaguugauggaaugcuaaauu

SEQ ID NO: 48067 - RNA, 21 nt, RNAi
uuaucaacuaccuuacgauuu

SEQ ID NO: 48068 - DNA, 21 bp, Homo sapiens
gatggaatgctaaagctaatt

SEQ ID NO: 48069 - RNA, 21 nt, RNAi
uggaaugcuaaagcuaauuuu

SEQ ID NO: 48070 - RNA, 21 nt, RNAi
uuaccuuacgauuucgauuaa

SEQ ID NO: 48071 - DNA, 21 bp, Homo sapiens
gattgcaaaccaaatgcaacc

SEQ ID NO: 48072 - RNA, 21 nt, RNAi
uugcaaaccaaaugcaaccuu

SEQ ID NO: 48073 - RNA, 21 nt, RNAi
uuaacguuugguuuacguugg

SEQ ID NO: 48074 - DNA, 21 bp, Homo sapiens
gattctcaggttggcacagtt

SEQ ID NO: 48075 - RNA, 21 nt, RNAi
uucucagguuggcacaguuuu

SEQ ID NO: 48076 - RNA, 21 nt, RNAi
uuaagaguccaaccgugucaa

SEQ ID NO: 48077 - DNA, 21 bp, Homo sapiens
gaagcaatcaaagatatgtct

SEQ ID NO: 48078 - RNA, 21 nt, RNAi
agcaaucaaagauaugucuuu

SEQ ID NO: 48079 - RNA, 21 nt, RNAi
uuucguuaguuucuauacaga

SEQ ID NO: 48080 - DNA, 21 bp, Homo sapiens
gatatgtcttcctccagagag

SEQ ID NO: 48081 - RNA, 21 nt, RNAi
uaugucuuccuccagagaguu

SEQ ID NO: 48082 - RNA, 21 nt, RNAi
uuauacagaaggaggucucuc

SEQ ID NO: 48083 - DNA, 21 bp, Homo sapiens
gatgtttggtccttaggatgt

SEQ ID NO: 48084 - RNA, 21 nt, RNAi
uguuugguccuuaggauguuu

SEQ ID NO: 48085 - RNA, 21 nt, RNAi
uuacaaaccaggaauccuaca

SEQ ID NO: 48086 - DNA, 21 bp, Homo sapiens
gatattccagagaaagatctt

SEQ ID NO: 48087 - RNA, 21 nt, RNAi
uauuccagagaaagaucuuuu

SEQ ID NO: 48088 - RNA, 21 nt, RNAi
uuauaaggucucuuucuagaa

SEQ ID NO: 48089 - DNA, 21 bp, Homo sapiens
gagaaagatcttcaagatgtg

SEQ ID NO: 48090 - RNA, 21 nt, RNAi
gaaagaucuucaagauguguu

SEQ ID NO: 48091 - RNA, 21 nt, RNAi
uucuuucuagaaguucuacac

SEQ ID NO: 48092 - DNA, 21 bp, Homo sapiens
gaaagatcttcaagatgtgtt

SEQ ID NO: 48093 - RNA, 21 nt, RNAi
aagaucuucaagauguguuuu

SEQ ID NO: 48094 - RNA, 21 nt, RNAi
uuuucuagaaguucuacacaa

SEQ ID NO: 48095 - DNA, 21 bp, Homo sapiens
gatcttcaagatgtgttaaag

SEQ ID NO: 48096 - RNA, 21 nt, RNAi
ucuucaagauguguuaaaguu

SEQ ID NO: 48097 - RNA, 21 nt, RNAi
uuagaaguucuacacaauuuc

SEQ ID NO: 48098 - DNA, 21 bp, Homo sapiens
gaggatatccattcctgagct

SEQ ID NO: 48099 - RNA, 21 nt, RNAi
ggauauccauuccugagcuuu

SEQ ID NO: 48100 - RNA, 21 nt, RNAi
uuccuauagguaaggacucga

SEQ ID NO: 48101 - DNA, 21 bp, Homo sapiens
gatatccattcctgagctcct

SEQ ID NO: 48102 - RNA, 21 nt, RNAi
uauccauuccugagcuccuuu

SEQ ID NO: 48103 - RNA, 21 nt, RNAi
uuauagguaaggacucgagga

SEQ ID NO: 48104 - DNA, 21 bp, Homo sapiens
gagctcctggctcatccatat

SEQ ID NO: 48105 - RNA, 21 nt, RNAi
gcuccuggcucauccauauuu

SEQ ID NO: 48106 - RNA, 21 nt, RNAi
uucgaggaccgaguagguaua

SEQ ID NO: 48107 - DNA, 21 bp, Homo sapiens
gaaccactgaagaaatgaaat

SEQ ID NO: 48108 - RNA, 21 nt, RNAi
accacugaagaaaugaaauuu

SEQ ID NO: 48109 - RNA, 21 nt, RNAi
uuuggugacuucuuuacuuua

SEQ ID NO: 48110 - DNA, 21 bp, Homo sapiens
gaacactatagtggtggtgaa

SEQ ID NO: 48111 - RNA, 21 nt, RNAi
acacuauagugguggugaauu

SEQ ID NO: 48112 - RNA, 21 nt, RNAi
uuugugauaucaccaccacuu

SEQ ID NO: 48113 - DNA, 21 bp, Homo sapiens
gaaagtcataattcttcatcc

SEQ ID NO: 48114 - RNA, 21 nt, RNAi
aagucauaauucuucauccuu

SEQ ID NO: 48115 - RNA, 21 nt, RNAi
uuuucaguauuaagaaguagg

SEQ ID NO: 48116 - DNA, 21 bp, Homo sapiens
gatttgcagttattcgtaatg

SEQ ID NO: 48117 - RNA, 21 nt, RNAi
uuugcaguuauucguaauguu

SEQ ID NO: 48118 - RNA, 21 nt, RNAi
uuaaacgucaauaagcauuac

SEQ ID NO: 48119 - DNA, 21 bp, Homo sapiens
gactgttatactcttgaatcc

SEQ ID NO: 48120 - RNA, 21 nt, RNAi
cuguuauacucuugaauccuu

SEQ ID NO: 48121 - RNA, 21 nt, RNAi
uugacaauaugagaacuuagg

SEQ ID NO: 48122 - DNA, 21 bp, Homo sapiens
gaagacaacatcactctgaag

SEQ ID NO: 48123 - RNA, 21 nt, RNAi
agacaacaucacucugaaguu

SEQ ID NO: 48124 - RNA, 21 nt, RNAi
uuucuguuguagugagacuuc

SEQ ID NO: 48125 - DNA, 21 bp, Homo sapiens
gacaacatcactctgaagtgt

SEQ ID NO: 48126 - RNA, 21 nt, RNAi
caacaucacucugaaguguuu

SEQ ID NO: 48127 - RNA, 21 nt, RNAi
uuguuguagugagacuucaca

SEQ ID NO: 48128 - DNA, 21 bp, Homo sapiens
tagaaatggaatccgaggatt

SEQ ID NO: 48129 - RNA, 21 nt, RNAi
gaaauggaauccgaggauuuu

SEQ ID NO: 48130 - RNA, 21 nt, RNAi
uucuuuaccuuaggcuccuaa

SEQ ID NO: 48131 - DNA, 21 bp, Homo sapiens
taagtggcagagaattgacaa

SEQ ID NO: 48132 - RNA, 21 nt, RNAi
aguggcagagaauugacaauu

SEQ ID NO: 48133 - RNA, 21 nt, RNAi
uuucaccgucucuuaacuguu

SEQ ID NO: 48134 - DNA, 21 bp, Homo sapiens
taatgaacaaagtgagagaca

SEQ ID NO: 48135 - RNA, 21 nt, RNAi
augaacaaagugagagacauu

SEQ ID NO: 48136 - RNA, 21 nt, RNAi
uuuacuuguuucacucucugu

SEQ ID NO: 48137 - DNA, 21 bp, Homo sapiens
tactgatgaactaagcttgaa

SEQ ID NO: 48138 - RNA, 21 nt, RNAi
cugaugaacuaagcuugaauu

SEQ ID NO: 48139 - RNA, 21 nt, RNAi
uugacuacuugauucgaacuu

SEQ ID NO: 48140 - DNA, 21 bp, Homo sapiens
taaccaaattatgatgatggc

SEQ ID NO: 48141 - RNA, 21 nt, RNAi
accaaauuaugaugauggcuu

SEQ ID NO: 48142 - RNA, 21 nt, RNAi
uuugguuuaauacuacuaccg

SEQ ID NO: 48143 - DNA, 21 bp, Homo sapiens
taaattgattggtcgttacag

SEQ ID NO: 48144 - RNA, 21 nt, RNAi
aauugauuggucguuacaguu

SEQ ID NO: 48145 - RNA, 21 nt, RNAi
uuuuaacuaaccagcaauguc

SEQ ID NO: 48146 - DNA, 21 bp, Homo sapiens
tacagtcaagcaattgaagcg

SEQ ID NO: 48147 - RNA, 21 nt, RNAi
cagucaagcaauugaagcguu

SEQ ID NO: 48148 - RNA, 21 nt, RNAi
uugucaguucguuaacuucgc

SEQ ID NO: 48149 - DNA, 21 bp, Homo sapiens
tagaattcaagtgagatttgc

SEQ ID NO: 48150 - RNA, 21 nt, RNAi
gaauucaagugagauuugcuu

SEQ ID NO: 48151 - RNA, 21 nt, RNAi
uucuuaaguucacucuaaacg

SEQ ID NO: 48152 - DNA, 21 bp, Homo sapiens
tattcaagagccagatgatgc

SEQ ID NO: 48153 - RNA, 21 nt, RNAi
uucaagagccagaugaugcuu

SEQ ID NO: 48154 - RNA, 21 nt, RNAi
uuaaguucucggucuacuacg

SEQ ID NO: 48155 - DNA, 21 bp, Homo sapiens
tactttcaaatggccagagca

SEQ ID NO: 48156 - RNA, 21 nt, RNAi
cuuucaaauggccagagcauu

SEQ ID NO: 48157 - RNA, 21 nt, RNAi
uugaaaguuuaccggucucgu

SEQ ID NO: 48158 - DNA, 21 bp, Homo sapiens
tagaacgtggagcagtaccac

SEQ ID NO: 48159 - RNA, 21 nt, RNAi
gaacguggagcaguaccacuu

SEQ ID NO: 48160 - RNA, 21 nt, RNAi
uucuugcaccucgucauggug

SEQ ID NO: 48161 - DNA, 21 bp, Homo sapiens
taccactagaaatgctggaaa

SEQ ID NO: 48162 - RNA, 21 nt, RNAi
ccacuagaaaugcuggaaauu

SEQ ID NO: 48163 - RNA, 21 nt, RNAi
uuggugaucuuuacgaccuuu

SEQ ID NO: 48164 - DNA, 21 bp, Homo sapiens
tatcagcatctacggtattaa

SEQ ID NO: 48165 - RNA, 21 nt, RNAi
ucagcaucuacgguauuaauu

SEQ ID NO: 48166 - RNA, 21 nt, RNAi
uuagucguagaugccauaauu

SEQ ID NO: 48167 - DNA, 21 bp, Homo sapiens
tacagaataggaacaacagtt

SEQ ID NO: 48168 - RNA, 21 nt, RNAi
cagaauaggaacaacaguuuu

SEQ ID NO: 48169 - RNA, 21 nt, RNAi
uugucuuauccuuguugucaa

SEQ ID NO: 48170 - DNA, 21 bp, Homo sapiens
taggaacaacagttgtgattc

SEQ ID NO: 48171 - RNA, 21 nt, RNAi
ggaacaacaguugugauucuu

SEQ ID NO: 48172 - RNA, 21 nt, RNAi
uuccuuguugucaacacuaag

SEQ ID NO: 48173 - DNA, 21 bp, Homo sapiens
tatatggagagaacatgccac

SEQ ID NO: 48174 - RNA, 21 nt, RNAi
uauggagagaacaugccacuu

SEQ ID NO: 48175 - RNA, 21 nt, RNAi
uuauaccucucuuguacggug

SEQ ID NO: 48176 - DNA, 21 bp, Homo sapiens
tatggagagaacatgccacca

SEQ ID NO: 48177 - RNA, 21 nt, RNAi
uggagagaacaugccaccauu

SEQ ID NO: 48178 - RNA, 21 nt, RNAi
uuaccucucuuguacgguggu

SEQ ID NO: 48179 - DNA, 21 bp, Homo sapiens
taggttaccggaattcattga

SEQ ID NO: 48180 - RNA, 21 nt, RNAi
gguuaccggaauucauugauu

SEQ ID NO: 48181 - RNA, 21 nt, RNAi
uuccaauggccuuaaguaacu

SEQ ID NO: 48182 - DNA, 21 bp, Homo sapiens
taccggaattcattgagacaa

SEQ ID NO: 48183 - RNA, 21 nt, RNAi
ccggaauucauugagacaauu

SEQ ID NO: 48184 - RNA, 21 nt, RNAi
uuggccuuaaguaacucuguu

SEQ ID NO: 48185 - DNA, 21 bp, Homo sapiens
tagatcagaatgccgagattt

SEQ ID NO: 48186 - RNA, 21 nt, RNAi
gaucagaaugccgagauuuuu

SEQ ID NO: 48187 - RNA, 21 nt, RNAi
uucuagucuuacggcucuaaa

SEQ ID NO: 48188 - DNA, 21 bp, Homo sapiens
taaaccaagtggaaatgattc

SEQ ID NO: 48189 - RNA, 21 nt, RNAi
aaccaaguggaaaugauucuu

SEQ ID NO: 48190 - RNA, 21 nt, RNAi
uuuugguucaccuuuacuaag

SEQ ID NO: 48191 - DNA, 21 bp, Homo sapiens
tagtcatttcaaggaacctct

SEQ ID NO: 48192 - RNA, 21 nt, RNAi
gucauuucaaggaaccucuuu

SEQ ID NO: 48193 - RNA, 21 nt, RNAi
uucaguaaaguuccuuggaga

SEQ ID NO: 48194 - DNA, 21 bp, Homo sapiens
taaagagtatcaagaaccaga

SEQ ID NO: 48195 - RNA, 21 nt, RNAi
aagaguaucaagaaccagauu

SEQ ID NO: 48196 - RNA, 21 nt, RNAi
uuuucucauaguucuuggucu

SEQ ID NO: 48197 - DNA, 21 bp, Homo sapiens
tatcaagaaccagaggttcca

SEQ ID NO: 48198 - RNA, 21 nt, RNAi
ucaagaaccagagguuccauu

SEQ ID NO: 48199 - RNA, 21 nt, RNAi
uuaguucuuggucuccaaggu

SEQ ID NO: 48200 - DNA, 21 bp, Homo sapiens
taaccagaaacagtggcaatc

SEQ ID NO: 48201 - RNA, 21 nt, RNAi
accagaaacaguggcaaucuu

SEQ ID NO: 48202 - RNA, 21 nt, RNAi
uuuggucuuugucaccguuag

SEQ ID NO: 48203 - DNA, 21 bp, Homo sapiens
taagagaaagtcagagtgtat

SEQ ID NO: 48204 - RNA, 21 nt, RNAi
agagaaagucagaguguauuu

SEQ ID NO: 48205 - RNA, 21 nt, RNAi
uuucucuuucagucucacaua

SEQ ID NO: 48206 - DNA, 21 bp, Homo sapiens
tattaaccagaatcctgctgc

SEQ ID NO: 48207 - RNA, 21 nt, RNAi
uuaaccagaauccugcugcuu

SEQ ID NO: 48208 - RNA, 21 nt, RNAi
uuaauuggucuuaggacgacg

SEQ ID NO: 48209 - DNA, 21 bp, Homo sapiens
taaccagaatcctgctgcatc

SEQ ID NO: 48210 - RNA, 21 nt, RNAi
accagaauccugcugcaucuu

SEQ ID NO: 48211 - RNA, 21 nt, RNAi
uuuggucuuaggacgacguag

SEQ ID NO: 48212 - DNA, 21 bp, Homo sapiens
taatacagagcagaaacatac

SEQ ID NO: 48213 - RNA, 21 nt, RNAi
auacagagcagaaacauacuu

SEQ ID NO: 48214 - RNA, 21 nt, RNAi
uuuaugucucgucuuuguaug

SEQ ID NO: 48215 - DNA, 21 bp, Homo sapiens
tacagagcagaaacataccac

SEQ ID NO: 48216 - RNA, 21 nt, RNAi
cagagcagaaacauaccacuu

SEQ ID NO: 48217 - RNA, 21 nt, RNAi
uugucucgucuuuguauggug

SEQ ID NO: 48218 - DNA, 21 bp, Homo sapiens
tatttgtaagacaccaagcag

SEQ ID NO: 48219 - RNA, 21 nt, RNAi
uuuguaagacaccaagcaguu

SEQ ID NO: 48220 - RNA, 21 nt, RNAi
uuaaacauucugugguucguc

SEQ ID NO: 48221 - DNA, 21 bp, Homo sapiens
taagacaccaagcagcaatac

SEQ ID NO: 48222 - RNA, 21 nt, RNAi
agacaccaagcagcaauacuu

SEQ ID NO: 48223 - RNA, 21 nt, RNAi
uuucugugguucgucguuaug

SEQ ID NO: 48224 - DNA, 21 bp, Homo sapiens
taccttggatgattacatgag

SEQ ID NO: 48225 - RNA, 21 nt, RNAi
ccuuggaugauuacaugaguu

SEQ ID NO: 48226 - RNA, 21 nt, RNAi
uuggaaccuacuaauguacuc

SEQ ID NO: 48227 - DNA, 21 bp, Homo sapiens
tagaactccagttgtaaagaa

SEQ ID NO: 48228 - RNA, 21 nt, RNAi
gaacuccaguuguaaagaauu

SEQ ID NO: 48229 - RNA, 21 nt, RNAi
uucuugaggucaacauuucuu

SEQ ID NO: 48230 - DNA, 21 bp, Homo sapiens
taaagaatgactttccacctg

SEQ ID NO: 48231 - RNA, 21 nt, RNAi
aagaaugacuuuccaccuguu

SEQ ID NO: 48232 - RNA, 21 nt, RNAi
uuuucuuacugaaagguggac

SEQ ID NO: 48233 - DNA, 21 bp, Homo sapiens
tatggccaacctgcctgtttc

SEQ ID NO: 48234 - RNA, 21 nt, RNAi
uggccaaccugccuguuucuu

SEQ ID NO: 48235 - RNA, 21 nt, RNAi
uuaccgguuggacggacaaag

SEQ ID NO: 48236 - DNA, 21 bp, Homo sapiens
tacttgccactccacttcaaa

SEQ ID NO: 48237 - RNA, 21 nt, RNAi
cuugccacuccacuucaaauu

SEQ ID NO: 48238 - RNA, 21 nt, RNAi
uugaacggugaggugaaguuu

SEQ ID NO: 48239 - DNA, 21 bp, Homo sapiens
tagcatcttcttcagcaaatg

SEQ ID NO: 48240 - RNA, 21 nt, RNAi
gcaucuucuucagcaaauguu

SEQ ID NO: 48241 - RNA, 21 nt, RNAi
uucguagaagaagucguuuac

SEQ ID NO: 48242 - DNA, 21 bp, Homo sapiens
tattaaagcagataggaagtg

SEQ ID NO: 48243 - RNA, 21 nt, RNAi
uuaaagcagauaggaaguguu

SEQ ID NO: 48244 - RNA, 21 nt, RNAi
uuaauuucgucuauccuucac

SEQ ID NO: 48245 - DNA, 21 bp, Homo sapiens
taaagcagataggaagtggag

SEQ ID NO: 48246 - RNA, 21 nt, RNAi
aagcagauaggaaguggaguu

SEQ ID NO: 48247 - RNA, 21 nt, RNAi
uuuucgucuauccuucaccuc

SEQ ID NO: 48248 - DNA, 21 bp, Homo sapiens
taggaagtggaggttcaagca

SEQ ID NO: 48249 - RNA, 21 nt, RNAi
ggaaguggagguucaagcauu

SEQ ID NO: 48250 - RNA, 21 nt, RNAi
uuccuucaccuccaaguucgu

SEQ ID NO: 48251 - DNA, 21 bp, Homo sapiens
tatgtgaacttagaagaagca

SEQ ID NO: 48252 - RNA, 21 nt, RNAi
ugugaacuuagaagaagcauu

SEQ ID NO: 48253 - RNA, 21 nt, RNAi
uuacacuugaaucuucuucgu

SEQ ID NO: 48254 - DNA, 21 bp, Homo sapiens
tagaagaagcagataaccaaa

SEQ ID NO: 48255 - RNA, 21 nt, RNAi
gaagaagcagauaaccaaauu

SEQ ID NO: 48256 - RNA, 21 nt, RNAi
uucuucuucgucuauugguuu

SEQ ID NO: 48257 - DNA, 21 bp, Homo sapiens
tagttaccggaacgaaatagc

SEQ ID NO: 48258 - RNA, 21 nt, RNAi
guuaccggaacgaaauagcuu

SEQ ID NO: 48259 - RNA, 21 nt, RNAi
uucaauggccuugcuuuaucg

SEQ ID NO: 48260 - DNA, 21 bp, Homo sapiens
taccggaacgaaatagcttat

SEQ ID NO: 48261 - RNA, 21 nt, RNAi
ccggaacgaaauagcuuauuu

SEQ ID NO: 48262 - RNA, 21 nt, RNAi
uuggccuugcuuuaucgaaua

SEQ ID NO: 48263 - DNA, 21 bp, Homo sapiens
taaactacaacaacacagtga

SEQ ID NO: 48264 - RNA, 21 nt, RNAi
aacuacaacaacacagugauu

SEQ ID NO: 48265 - RNA, 21 nt, RNAi
uuuugauguuguugugucacu

SEQ ID NO: 48266 - DNA, 21 bp, Homo sapiens
tacaacaacacagtgataaga

SEQ ID NO: 48267 - RNA, 21 nt, RNAi
caacaacacagugauaagauu

SEQ ID NO: 48268 - RNA, 21 nt, RNAi
uuguuguugugucacuauucu

SEQ ID NO: 48269 - DNA, 21 bp, Homo sapiens
taagatcatccgactttatga

SEQ ID NO: 48270 - RNA, 21 nt, RNAi
agaucauccgacuuuaugauu

SEQ ID NO: 48271 - RNA, 21 nt, RNAi
uuucuaguaggcugaaauacu

SEQ ID NO: 48272 - DNA, 21 bp, Homo sapiens
tatgattatgaaatcacggac

SEQ ID NO: 48273 - RNA, 21 nt, RNAi
ugauuaugaaaucacggacuu

SEQ ID NO: 48274 - RNA, 21 nt, RNAi
uuacuaauacuuuagugccug

SEQ ID NO: 48275 - DNA, 21 bp, Homo sapiens
tatgaaatcacggaccagtac

SEQ ID NO: 48276 - RNA, 21 nt, RNAi
ugaaaucacggaccaguacuu

SEQ ID NO: 48277 - RNA, 21 nt, RNAi
uuacuuuagugccuggucaug

SEQ ID NO: 48278 - DNA, 21 bp, Homo sapiens
tacatctacatggtaatggag

SEQ ID NO: 48279 - RNA, 21 nt, RNAi
caucuacaugguaauggaguu

SEQ ID NO: 48280 - RNA, 21 nt, RNAi
uuguagauguaccauuaccuc

SEQ ID NO: 48281 - DNA, 21 bp, Homo sapiens
tacatggtaatggagtgtgga

SEQ ID NO: 48282 - RNA, 21 nt, RNAi
caugguaauggaguguggauu

SEQ ID NO: 48283 - RNA, 21 nt, RNAi
uuguaccauuaccucacaccu

SEQ ID NO: 48284 - DNA, 21 bp, Homo sapiens
taatggagtgtggaaatattg

SEQ ID NO: 48285 - RNA, 21 nt, RNAi
auggaguguggaaauauuguu

SEQ ID NO: 48286 - RNA, 21 nt, RNAi
uuuaccucacaccuuuauaac

SEQ ID NO: 48287 - DNA, 21 bp, Homo sapiens
tatgttagaggcagttcacac

SEQ ID NO: 48288 - RNA, 21 nt, RNAi
uguuagaggcaguucacacuu

SEQ ID NO: 48289 - RNA, 21 nt, RNAi
uuacaaucuccgucaagugug

SEQ ID NO: 48290 - DNA, 21 bp, Homo sapiens
tagaggcagttcacacaatcc

SEQ ID NO: 48291 - RNA, 21 nt, RNAi
gaggcaguucacacaauccuu

SEQ ID NO: 48292 - RNA, 21 nt, RNAi
uucuccgucaaguguguuagg

SEQ ID NO: 48293 - DNA, 21 bp, Homo sapiens
taaaccagctaactttctgat

SEQ ID NO: 48294 - RNA, 21 nt, RNAi
aaccagcuaacuuucugauuu

SEQ ID NO: 48295 - RNA, 21 nt, RNAi
uuuuggucgauugaaagacua

SEQ ID NO: 48296 - DNA, 21 bp, Homo sapiens
taactttctgatagttgatgg

SEQ ID NO: 48297 - RNA, 21 nt, RNAi
acuuucugauaguugaugguu

SEQ ID NO: 48298 - RNA, 21 nt, RNAi
uuugaaagacuaucaacuacc

SEQ ID NO: 48299 - DNA, 21 bp, Homo sapiens
tagttgatggaatgctaaagc

SEQ ID NO: 48300 - RNA, 21 nt, RNAi
guugauggaaugcuaaagcuu

SEQ ID NO: 48301 - RNA, 21 nt, RNAi
uucaacuaccuuacgauuucg

SEQ ID NO: 48302 - DNA, 21 bp, Homo sapiens
taaagattctcaggttggcac

SEQ ID NO: 48303 - RNA, 21 nt, RNAi
aagauucucagguuggcacuu

SEQ ID NO: 48304 - RNA, 21 nt, RNAi
uuuucuaagaguccaaccgug

SEQ ID NO: 48305 - DNA, 21 bp, Homo sapiens
taattatatgccaccagaagc

SEQ ID NO: 48306 - RNA, 21 nt, RNAi
auuauaugccaccagaagcuu

SEQ ID NO: 48307 - RNA, 21 nt, RNAi
uuuaauauacgguggucuucg

SEQ ID NO: 48308 - DNA, 21 bp, Homo sapiens
tatatgccaccagaagcaatc

SEQ ID NO: 48309 - RNA, 21 nt, RNAi
uaugccaccagaagcaaucuu

SEQ ID NO: 48310 - RNA, 21 nt, RNAi
uuauacgguggucuucguuag

SEQ ID NO: 48311 - DNA, 21 bp, Homo sapiens
tatgccaccagaagcaatcaa

SEQ ID NO: 48312 - RNA, 21 nt, RNAi
ugccaccagaagcaaucaauu

SEQ ID NO: 48313 - RNA, 21 nt, RNAi
uuacgguggucuucguuaguu

SEQ ID NO: 48314 - DNA, 21 bp, Homo sapiens
tatgtcttcctccagagagaa

SEQ ID NO: 48315 - RNA, 21 nt, RNAi
ugucuuccuccagagagaauu

SEQ ID NO: 48316 - RNA, 21 nt, RNAi
uuacagaaggaggucucucuu

SEQ ID NO: 48317 - DNA, 21 bp, Homo sapiens
tacatgccataattgatccta

SEQ ID NO: 48318 - RNA, 21 nt, RNAi
caugccauaauugauccuauu

SEQ ID NO: 48319 - RNA, 21 nt, RNAi
uuguacgguauuaacuaggau

SEQ ID NO: 48320 - DNA, 21 bp, Homo sapiens
tattccagagaaagatcttca

SEQ ID NO: 48321 - RNA, 21 nt, RNAi
uuccagagaaagaucuucauu

SEQ ID NO: 48322 - RNA, 21 nt, RNAi
uuaaggucucuuucuagaagu

SEQ ID NO: 48323 - DNA, 21 bp, Homo sapiens
tatccattcctgagctcctgg

SEQ ID NO: 48324 - RNA, 21 nt, RNAi
uccauuccugagcuccugguu

SEQ ID NO: 48325 - RNA, 21 nt, RNAi
uuagguaaggacucgaggacc

SEQ ID NO: 48326 - DNA, 21 bp, Homo sapiens
tatatgaacactatagtggtg

SEQ ID NO: 48327 - RNA, 21 nt, RNAi
uaugaacacuauagugguguu

SEQ ID NO: 48328 - RNA, 21 nt, RNAi
uuauacuugugauaucaccac

SEQ ID NO: 48329 - DNA, 21 bp, Homo sapiens
tatgaacactatagtggtggt

SEQ ID NO: 48330 - RNA, 21 nt, RNAi
ugaacacuauaguggugguuu

SEQ ID NO: 48331 - RNA, 21 nt, RNAi
uuacuugugauaucaccacca

SEQ ID NO: 48332 - DNA, 21 bp, Homo sapiens
tatagtggtggtgaaagtcat

SEQ ID NO: 48333 - RNA, 21 nt, RNAi
uagugguggugaaagucauuu

SEQ ID NO: 48334 - RNA, 21 nt, RNAi
uuaucaccaccacuuucagua

SEQ ID NO: 48335 - DNA, 21 bp, Homo sapiens
tagtggtggtgaaagtcataa

SEQ ID NO: 48336 - RNA, 21 nt, RNAi
gugguggugaaagucauaauu

SEQ ID NO: 48337 - RNA, 21 nt, RNAi
uucaccaccacuuucaguauu

SEQ ID NO: 48338 - DNA, 21 bp, Homo sapiens
taattcttcatcctccaagac

SEQ ID NO: 48339 - RNA, 21 nt, RNAi
auucuucauccuccaagacuu

SEQ ID NO: 48340 - RNA, 21 nt, RNAi
uuuaagaaguaggagguucug

SEQ ID NO: 48341 - DNA, 21 bp, Homo sapiens
tattcgtaatgtcagatacca

SEQ ID NO: 48342 - RNA, 21 nt, RNAi
uucguaaugucagauaccauu

SEQ ID NO: 48343 - RNA, 21 nt, RNAi
uuaagcauuacagucuauggu

SEQ ID NO: 48344 - DNA, 21 bp, Homo sapiens
taatgtcagataccacctata

SEQ ID NO: 48345 - RNA, 21 nt, RNAi
augucagauaccaccuauauu

SEQ ID NO: 48346 - RNA, 21 nt, RNAi
uuuacagucuaugguggauau

SEQ ID NO: 48347 - DNA, 21 bp, Homo sapiens
tattggactgttatactcttg

SEQ ID NO: 48348 - RNA, 21 nt, RNAi
uuggacuguuauacucuuguu

SEQ ID NO: 48349 - RNA, 21 nt, RNAi
uuaaccugacaauaugagaac

SEQ ID NO: 48350 - DNA, 21 bp, Homo sapiens
tacatttgaagacaacatcac

SEQ ID NO: 48351 - RNA, 21 nt, RNAi
cauuugaagacaacaucacuu

SEQ ID NO: 48352 - RNA, 21 nt, RNAi
uuguaaacuucuguuguagug

SEQ ID NO: 48353 - DNA, 21 bp, Homo sapiens
tagcaaccacttatggcactg

SEQ ID NO: 48354 - RNA, 21 nt, RNAi
gcaaccacuuauggcacuguu

SEQ ID NO: 48355 - RNA, 21 nt, RNAi
uucguuggugaauaccgugac

SEQ ID NO: 48356 - DNA, 21 bp, Homo sapiens
tatgctcttgtgtaatctact

SEQ ID NO: 48357 - RNA, 21 nt, RNAi
ugcucuuguguaaucuacuuu

SEQ ID NO: 48358 - RNA, 21 nt, RNAi
uuacgagaacacauuagauga

SEQ ID NO: 48359 - DNA, 21 bp, Homo sapiens
aaacagtgttccgctaagtga

SEQ ID NO: 48360 - RNA, 21 nt, RNAi
acaguguuccgcuaagugauu

SEQ ID NO: 48361 - RNA, 21 nt, RNAi
uuugucacaaggcgauucacu

SEQ ID NO: 48362 - DNA, 21 bp, Homo sapiens
aacagtgttccgctaagtgat

SEQ ID NO: 48363 - RNA, 21 nt, RNAi
caguguuccgcuaagugauuu

SEQ ID NO: 48364 - RNA, 21 nt, RNAi
uugucacaaggcgauucacua

SEQ ID NO: 48365 - DNA, 21 bp, Homo sapiens
aaattgattggtcgttacagt

SEQ ID NO: 48366 - RNA, 21 nt, RNAi
auugauuggucguuacaguuu

SEQ ID NO: 48367 - RNA, 21 nt, RNAi
uuuaacuaaccagcaauguca

SEQ ID NO: 48368 - DNA, 21 bp, Homo sapiens
aattgattggtcgttacagtc

SEQ ID NO: 48369 - RNA, 21 nt, RNAi
uugauuggucguuacagucuu

SEQ ID NO: 48370 - RNA, 21 nt, RNAi
uuaacuaaccagcaaugucag

SEQ ID NO: 48371 - DNA, 21 bp, Homo sapiens
aattcaagtgagatttgctga

SEQ ID NO: 48372 - RNA, 21 nt, RNAi
uucaagugagauuugcugauu

SEQ ID NO: 48373 - RNA, 21 nt, RNAi
uuaaguucacucuaaacgacu

SEQ ID NO: 48374 - DNA, 21 bp, Homo sapiens
aatttgaactgtcacaaggta

SEQ ID NO: 48375 - RNA, 21 nt, RNAi
uuugaacugucacaagguauu

SEQ ID NO: 48376 - RNA, 21 nt, RNAi
uuaaacuugacaguguuccau

SEQ ID NO: 48377 - DNA, 21 bp, Homo sapiens
aaagctgtagaacgtggagca

SEQ ID NO: 48378 - RNA, 21 nt, RNAi
agcuguagaacguggagcauu

SEQ ID NO: 48379 - RNA, 21 nt, RNAi
uuucgacaucuugcaccucgu

SEQ ID NO: 48380 - DNA, 21 bp, Homo sapiens
aaataggttaccggaattcat

SEQ ID NO: 48381 - RNA, 21 nt, RNAi
auagguuaccggaauucauuu

SEQ ID NO: 48382 - RNA, 21 nt, RNAi
uuuauccaauggccuuaagua

SEQ ID NO: 48383 - DNA, 21 bp, Homo sapiens
aataggttaccggaattcatt

SEQ ID NO: 48384 - RNA, 21 nt, RNAi
uagguuaccggaauucauuuu

SEQ ID NO: 48385 - RNA, 21 nt, RNAi
uuauccaauggccuuaaguaa

SEQ ID NO: 48386 - DNA, 21 bp, Homo sapiens
aatgccgagatttggttgtgc

SEQ ID NO: 48387 - RNA, 21 nt, RNAi
ugccgagauuugguugugcuu

SEQ ID NO: 48388 - RNA, 21 nt, RNAi
uuacggcucuaaaccaacacg

SEQ ID NO: 48389 - DNA, 21 bp, Homo sapiens
aaacggaatcaagtcttctag

SEQ ID NO: 48390 - RNA, 21 nt, RNAi
acggaaucaagucuucuaguu

SEQ ID NO: 48391 - RNA, 21 nt, RNAi
uuugccuuaguucagaagauc

SEQ ID NO: 48392 - DNA, 21 bp, Homo sapiens
aacggaatcaagtcttctagc

SEQ ID NO: 48393 - RNA, 21 nt, RNAi
cggaaucaagucuucuagcuu

SEQ ID NO: 48394 - RNA, 21 nt, RNAi
uugccuuaguucagaagaucg

SEQ ID NO: 48395 - DNA, 21 bp, Homo sapiens
aaagtcagagtgtattaacca

SEQ ID NO: 48396 - RNA, 21 nt, RNAi
agucagaguguauuaaccauu

SEQ ID NO: 48397 - RNA, 21 nt, RNAi
uuucagucucacauaauuggu

SEQ ID NO: 48398 - DNA, 21 bp, Homo sapiens
aagtcagagtgtattaaccag

SEQ ID NO: 48399 - RNA, 21 nt, RNAi
gucagaguguauuaaccaguu

SEQ ID NO: 48400 - RNA, 21 nt, RNAi
uucagucucacauaauugguc

SEQ ID NO: 48401 - DNA, 21 bp, Homo sapiens
aatacagagcagaaacatacc

SEQ ID NO: 48402 - RNA, 21 nt, RNAi
uacagagcagaaacauaccuu

SEQ ID NO: 48403 - RNA, 21 nt, RNAi
uuaugucucgucuuuguaugg

SEQ ID NO: 48404 - DNA, 21 bp, Homo sapiens
aataccttggatgattacatg

SEQ ID NO: 48405 - RNA, 21 nt, RNAi
uaccuuggaugauuacauguu

SEQ ID NO: 48406 - RNA, 21 nt, RNAi
uuauggaaccuacuaauguac

SEQ ID NO: 48407 - DNA, 21 bp, Homo sapiens
aaagaatgactttccacctgc

SEQ ID NO: 48408 - RNA, 21 nt, RNAi
agaaugacuuuccaccugcuu

SEQ ID NO: 48409 - RNA, 21 nt, RNAi
uuucuuacugaaagguggacg

SEQ ID NO: 48410 - DNA, 21 bp, Homo sapiens
aagaatgactttccacctgct

SEQ ID NO: 48411 - RNA, 21 nt, RNAi
gaaugacuuuccaccugcuuu

SEQ ID NO: 48412 - RNA, 21 nt, RNAi
uucuuacugaaagguggacga

SEQ ID NO: 48413 - DNA, 21 bp, Homo sapiens
aacagcatcaaatacttgcca

SEQ ID NO: 48414 - RNA, 21 nt, RNAi
cagcaucaaauacuugccauu

SEQ ID NO: 48415 - RNA, 21 nt, RNAi
uugucguaguuuaugaacggu

SEQ ID NO: 48416 - DNA, 21 bp, Homo sapiens
aactcttgatagttaccggaa

SEQ ID NO: 48417 - RNA, 21 nt, RNAi
cucuugauaguuaccggaauu

SEQ ID NO: 48418 - RNA, 21 nt, RNAi
uugagaacuaucaauggccuu

SEQ ID NO: 48419 - DNA, 21 bp, Homo sapiens
aaatcacggaccagtacatct

SEQ ID NO: 48420 - RNA, 21 nt, RNAi
aucacggaccaguacaucuuu

SEQ ID NO: 48421 - RNA, 21 nt, RNAi
uuuagugccuggucauguaga

SEQ ID NO: 48422 - DNA, 21 bp, Homo sapiens
aatcacggaccagtacatcta

SEQ ID NO: 48423 - RNA, 21 nt, RNAi
ucacggaccaguacaucuauu

SEQ ID NO: 48424 - RNA, 21 nt, RNAi
uuagugccuggucauguagau

SEQ ID NO: 48425 - DNA, 21 bp, Homo sapiens
aactttctgatagttgatgga

SEQ ID NO: 48426 - RNA, 21 nt, RNAi
cuuucugauaguugauggauu

SEQ ID NO: 48427 - RNA, 21 nt, RNAi
uugaaagacuaucaacuaccu

SEQ ID NO: 48428 - DNA, 21 bp, Homo sapiens
aaagattctcaggttggcaca

SEQ ID NO: 48429 - RNA, 21 nt, RNAi
agauucucagguuggcacauu

SEQ ID NO: 48430 - RNA, 21 nt, RNAi
uuucuaagaguccaaccgugu

SEQ ID NO: 48431 - DNA, 21 bp, Homo sapiens
aagattctcaggttggcacag

SEQ ID NO: 48432 - RNA, 21 nt, RNAi
gauucucagguuggcacaguu

SEQ ID NO: 48433 - RNA, 21 nt, RNAi
uucuaagaguccaaccguguc

SEQ ID NO: 48434 - DNA, 21 bp, Homo sapiens
aatctaagtcaaagataagcc

SEQ ID NO: 48435 - RNA, 21 nt, RNAi
ucuaagucaaagauaagccuu

SEQ ID NO: 48436 - RNA, 21 nt, RNAi
uuagauucaguuucuauucgg

SEQ ID NO: 48437 - DNA, 21 bp, Homo sapiens
aaacaccatttcagcagataa

SEQ ID NO: 48438 - RNA, 21 nt, RNAi
acaccauuucagcagauaauu

SEQ ID NO: 48439 - RNA, 21 nt, RNAi
uuugugguaaagucgucuauu

SEQ ID NO: 48440 - DNA, 21 bp, Homo sapiens
aacaccatttcagcagataat

SEQ ID NO: 48441 - RNA, 21 nt, RNAi
caccauuucagcagauaauuu

SEQ ID NO: 48442 - RNA, 21 nt, RNAi
uugugguaaagucgucuauua

SEQ ID NO: 48443 - DNA, 21 bp, Homo sapiens
aaacagaggatatccattcct

SEQ ID NO: 48444 - RNA, 21 nt, RNAi
acagaggauauccauuccuuu

SEQ ID NO: 48445 - RNA, 21 nt, RNAi
uuugucuccuauagguaagga

SEQ ID NO: 48446 - DNA, 21 bp, Homo sapiens
aacagaggatatccattcctg

SEQ ID NO: 48447 - RNA, 21 nt, RNAi
cagaggauauccauuccuguu

SEQ ID NO: 48448 - RNA, 21 nt, RNAi
uugucuccuauagguaaggac

SEQ ID NO: 48449 - DNA, 21 bp, Homo sapiens
cagtgttccgctaagtgatgc

SEQ ID NO: 48450 - RNA, 21 nt, RNAi
guguuccgcuaagugaugcuu

SEQ ID NO: 48451 - RNA, 21 nt, RNAi
uucacaaggcgauucacuacg

SEQ ID NO: 48452 - DNA, 21 bp, Homo sapiens
cagatgatgcacgtgactact

SEQ ID NO: 48453 - RNA, 21 nt, RNAi
gaugaugcacgugacuacuuu

SEQ ID NO: 48454 - RNA, 21 nt, RNAi
uucuacuacgugcacugauga

SEQ ID NO: 48455 - DNA, 21 bp, Homo sapiens
cagcatctacggtattaactg

SEQ ID NO: 48456 - RNA, 21 nt, RNAi
gcaucuacgguauuaacuguu

SEQ ID NO: 48457 - RNA, 21 nt, RNAi
uucguagaugccauaauugac

SEQ ID NO: 48458 - DNA, 21 bp, Homo sapiens
cagaaataggttaccggaatt

SEQ ID NO: 48459 - RNA, 21 nt, RNAi
gaaauagguuaccggaauuuu

SEQ ID NO: 48460 - RNA, 21 nt, RNAi
uucuuuauccaauggccuuaa

SEQ ID NO: 48461 - DNA, 21 bp, Homo sapiens
cagttaaccttctaaatagcc

SEQ ID NO: 48462 - RNA, 21 nt, RNAi
guuaaccuucuaaauagccuu

SEQ ID NO: 48463 - RNA, 21 nt, RNAi
uucaauuggaagauuuaucgg

SEQ ID NO: 48464 - DNA, 21 bp, Homo sapiens
cagatgattcagttgtacctt

SEQ ID NO: 48465 - RNA, 21 nt, RNAi
gaugauucaguuguaccuuuu

SEQ ID NO: 48466 - RNA, 21 nt, RNAi
uucuacuaagucaacauggaa

SEQ ID NO: 48467 - DNA, 21 bp, Homo sapiens
cagaatgccgagatttggttg

SEQ ID NO: 48468 - RNA, 21 nt, RNAi
gaaugccgagauuugguuguu

SEQ ID NO: 48469 - RNA, 21 nt, RNAi
uucuuacggcucuaaaccaac

SEQ ID NO: 48470 - DNA, 21 bp, Homo sapiens
cagaggttccagagagtaacc

SEQ ID NO: 48471 - RNA, 21 nt, RNAi
gagguuccagagaguaaccuu

SEQ ID NO: 48472 - RNA, 21 nt, RNAi
uucuccaaggucucucauugg

SEQ ID NO: 48473 - DNA, 21 bp, Homo sapiens
catcttcaaatcactggcaga

SEQ ID NO: 48474 - RNA, 21 nt, RNAi
ucuucaaaucacuggcagauu

SEQ ID NO: 48475 - RNA, 21 nt, RNAi
uuagaaguuuagugaccgucu

SEQ ID NO: 48476 - DNA, 21 bp, Homo sapiens
cactggcagattccggagtta

SEQ ID NO: 48477 - RNA, 21 nt, RNAi
cuggcagauuccggaguuauu

SEQ ID NO: 48478 - RNA, 21 nt, RNAi
uugaccgucuaaggccucaau

SEQ ID NO: 48479 - DNA, 21 bp, Homo sapiens
cagagcagaaacataccactt

SEQ ID NO: 48480 - RNA, 21 nt, RNAi
gagcagaaacauaccacuuuu

SEQ ID NO: 48481 - RNA, 21 nt, RNAi
uucucgucuuuguauggugaa

SEQ ID NO: 48482 - DNA, 21 bp, Homo sapiens
caacatctaaatggtttgacc

SEQ ID NO: 48483 - RNA, 21 nt, RNAi
acaucuaaaugguuugaccuu

SEQ ID NO: 48484 - RNA, 21 nt, RNAi
uuuguagauuuaccaaacugg

SEQ ID NO: 48485 - DNA, 21 bp, Homo sapiens
caccaagcagcaataccttgg

SEQ ID NO: 48486 - RNA, 21 nt, RNAi
ccaagcagcaauaccuugguu

SEQ ID NO: 48487 - RNA, 21 nt, RNAi
uugguucgucguuauggaacc

SEQ ID NO: 48488 - DNA, 21 bp, Homo sapiens
cacctgcttgtcagttgtcaa

SEQ ID NO: 48489 - RNA, 21 nt, RNAi
ccugcuugucaguugucaauu

SEQ ID NO: 48490 - RNA, 21 nt, RNAi
uuggacgaacagucaacaguu

SEQ ID NO: 48491 - DNA, 21 bp, Homo sapiens
cagttgtcaacaccttatggc

SEQ ID NO: 48492 - RNA, 21 nt, RNAi
guugucaacaccuuauggcuu

SEQ ID NO: 48493 - RNA, 21 nt, RNAi
uucaacaguuguggaauaccg

SEQ ID NO: 48494 - DNA, 21 bp, Homo sapiens
cacagtgataagatcatccga

SEQ ID NO: 48495 - RNA, 21 nt, RNAi
cagugauaagaucauccgauu

SEQ ID NO: 48496 - RNA, 21 nt, RNAi
uugucacuauucuaguaggcu

SEQ ID NO: 48497 - DNA, 21 bp, Homo sapiens
cagtgataagatcatccgact

SEQ ID NO: 48498 - RNA, 21 nt, RNAi
gugauaagaucauccgacuuu

SEQ ID NO: 48499 - RNA, 21 nt, RNAi
uucacuauucuaguaggcuga

SEQ ID NO: 48500 - DNA, 21 bp, Homo sapiens
cacggaccagtacatctacat

SEQ ID NO: 48501 - RNA, 21 nt, RNAi
cggaccaguacaucuacauuu

SEQ ID NO: 48502 - RNA, 21 nt, RNAi
uugccuggucauguagaugua

SEQ ID NO: 48503 - DNA, 21 bp, Homo sapiens
cagtacatctacatggtaatg

SEQ ID NO: 48504 - RNA, 21 nt, RNAi
guacaucuacaugguaauguu

SEQ ID NO: 48505 - RNA, 21 nt, RNAi
uucauguagauguaccauuac

SEQ ID NO: 48506 - DNA, 21 bp, Homo sapiens
catggtaatggagtgtggaaa

SEQ ID NO: 48507 - RNA, 21 nt, RNAi
ugguaauggaguguggaaauu

SEQ ID NO: 48508 - RNA, 21 nt, RNAi
uuaccauuaccucacaccuuu

SEQ ID NO: 48509 - DNA, 21 bp, Homo sapiens
cagttcacacaatccatcaac

SEQ ID NO: 48510 - RNA, 21 nt, RNAi
guucacacaauccaucaacuu

SEQ ID NO: 48511 - RNA, 21 nt, RNAi
uucaaguguguuagguaguug

SEQ ID NO: 48512 - DNA, 21 bp, Homo sapiens
cacaatccatcaacatggcat

SEQ ID NO: 48513 - RNA, 21 nt, RNAi
caauccaucaacauggcauuu

SEQ ID NO: 48514 - RNA, 21 nt, RNAi
uuguuagguaguuguaccgua

SEQ ID NO: 48515 - DNA, 21 bp, Homo sapiens
caatccatcaacatggcattg

SEQ ID NO: 48516 - RNA, 21 nt, RNAi
auccaucaacauggcauuguu

SEQ ID NO: 48517 - RNA, 21 nt, RNAi
uuuagguaguuguaccguaac

SEQ ID NO: 48518 - DNA, 21 bp, Homo sapiens
cagaggatatccattcctgag

SEQ ID NO: 48519 - RNA, 21 nt, RNAi
gaggauauccauuccugaguu

SEQ ID NO: 48520 - RNA, 21 nt, RNAi
uucuccuauagguaaggacuc

SEQ ID NO: 48521 - DNA, 21 bp, Homo sapiens
catccagttaaccaaatggcc

SEQ ID NO: 48522 - RNA, 21 nt, RNAi
uccaguuaaccaaauggccuu

SEQ ID NO: 48523 - RNA, 21 nt, RNAi
uuaggucaauugguuuaccgg

SEQ ID NO: 48524 - DNA, 21 bp, Homo sapiens
caacttgttggtctgaattct

SEQ ID NO: 48525 - RNA, 21 nt, RNAi
acuuguuggucugaauucuuu

SEQ ID NO: 48526 - RNA, 21 nt, RNAi
uuugaacaaccagacuuaaga

SEQ ID NO: 48527 - DNA, 21 bp, Homo sapiens
gaggactggttgagtttgttg

SEQ ID NO: 48528 - RNA, 21 nt, RNAi
ggacugguugaguuuguuguu

SEQ ID NO: 48529 - RNA, 21 nt, RNAi
uuccugaccaacucaaacaac

SEQ ID NO: 48530 - DNA, 21 bp, Homo sapiens
gactggttgagtttgttgctc

SEQ ID NO: 48531 - RNA, 21 nt, RNAi
cugguugaguuuguugcucuu

SEQ ID NO: 48532 - RNA, 21 nt, RNAi
uugaccaacucaaacaacgag

SEQ ID NO: 48533 - DNA, 21 bp, Homo sapiens
gattggtcgttacagtcaagc

SEQ ID NO: 48534 - RNA, 21 nt, RNAi
uuggucguuacagucaagcuu

SEQ ID NO: 48535 - RNA, 21 nt, RNAi
uuaaccagcaaugucaguucg

SEQ ID NO: 48536 - DNA, 21 bp, Homo sapiens
gatgatgcacgtgactacttt

SEQ ID NO: 48537 - RNA, 21 nt, RNAi
ugaugcacgugacuacuuuuu

SEQ ID NO: 48538 - RNA, 21 nt, RNAi
uuacuacgugcacugaugaaa

SEQ ID NO: 48539 - DNA, 21 bp, Homo sapiens
gatgcacgtgactactttcaa

SEQ ID NO: 48540 - RNA, 21 nt, RNAi
ugcacgugacuacuuucaauu

SEQ ID NO: 48541 - RNA, 21 nt, RNAi
uuacgugcacugaugaaaguu

SEQ ID NO: 48542 - DNA, 21 bp, Homo sapiens
gactactttcaaatggccaga

SEQ ID NO: 48543 - RNA, 21 nt, RNAi
cuacuuucaaauggccagauu

SEQ ID NO: 48544 - RNA, 21 nt, RNAi
uugaugaaaguuuaccggucu

SEQ ID NO: 48545 - DNA, 21 bp, Homo sapiens
gattccagaggacagactact

SEQ ID NO: 48546 - RNA, 21 nt, RNAi
uuccagaggacagacuacuuu

SEQ ID NO: 48547 - RNA, 21 nt, RNAi
uuaaggucuccugucugauga

SEQ ID NO: 48548 - DNA, 21 bp, Homo sapiens
gaaataggttaccggaattca

SEQ ID NO: 48549 - RNA, 21 nt, RNAi
aauagguuaccggaauucauu

SEQ ID NO: 48550 - RNA, 21 nt, RNAi
uuuuauccaauggccuuaagu

SEQ ID NO: 48551 - DNA, 21 bp, Homo sapiens
gatgattcagttgtaccttgt

SEQ ID NO: 48552 - RNA, 21 nt, RNAi
ugauucaguuguaccuuguuu

SEQ ID NO: 48553 - RNA, 21 nt, RNAi
uuacuaagucaacauggaaca

SEQ ID NO: 48554 - DNA, 21 bp, Homo sapiens
gaatgccgagatttggttgtg

SEQ ID NO: 48555 - RNA, 21 nt, RNAi
augccgagauuugguuguguu

SEQ ID NO: 48556 - RNA, 21 nt, RNAi
uuuacggcucuaaaccaacac

SEQ ID NO: 48557 - DNA, 21 bp, Homo sapiens
gatttggttgtgcctggatct

SEQ ID NO: 48558 - RNA, 21 nt, RNAi
uuugguugugccuggaucuuu

SEQ ID NO: 48559 - RNA, 21 nt, RNAi
uuaaaccaacacggaccuaga

SEQ ID NO: 48560 - DNA, 21 bp, Homo sapiens
gaggttccagagagtaaccag

SEQ ID NO: 48561 - RNA, 21 nt, RNAi
gguuccagagaguaaccaguu

SEQ ID NO: 48562 - RNA, 21 nt, RNAi
uuccaaggucucucauugguc

SEQ ID NO: 48563 - DNA, 21 bp, Homo sapiens
gaaagtcagagtgtattaacc

SEQ ID NO: 48564 - RNA, 21 nt, RNAi
aagucagaguguauuaaccuu

SEQ ID NO: 48565 - RNA, 21 nt, RNAi
uuuucagucucacauaauugg

SEQ ID NO: 48566 - DNA, 21 bp, Homo sapiens
gaagtggaggttcaagcaagg

SEQ ID NO: 48567 - RNA, 21 nt, RNAi
aguggagguucaagcaagguu

SEQ ID NO: 48568 - RNA, 21 nt, RNAi
uuucaccuccaaguucguucc

SEQ ID NO: 48569 - DNA, 21 bp, Homo sapiens
gaggttcaagcaaggtatttc

SEQ ID NO: 48570 - RNA, 21 nt, RNAi
gguucaagcaagguauuucuu

SEQ ID NO: 48571 - RNA, 21 nt, RNAi
uuccaaguucguuccauaaag

SEQ ID NO: 48572 - DNA, 21 bp, Homo sapiens
gatagttaccggaacgaaata

SEQ ID NO: 48573 - RNA, 21 nt, RNAi
uaguuaccggaacgaaauauu

SEQ ID NO: 48574 - RNA, 21 nt, RNAi
uuaucaauggccuugcuuuau

SEQ ID NO: 48575 - DNA, 21 bp, Homo sapiens
gattatgaaatcacggaccag

SEQ ID NO: 48576 - RNA, 21 nt, RNAi
uuaugaaaucacggaccaguu

SEQ ID NO: 48577 - RNA, 21 nt, RNAi
uuaauacuuuagugccugguc

SEQ ID NO: 48578 - DNA, 21 bp, Homo sapiens
gaaatcacggaccagtacatc

SEQ ID NO: 48579 - RNA, 21 nt, RNAi
aaucacggaccaguacaucuu

SEQ ID NO: 48580 - RNA, 21 nt, RNAi
uuuuagugccuggucauguag

SEQ ID NO: 48581 - DNA, 21 bp, Homo sapiens
gaccagtacatctacatggta

SEQ ID NO: 48582 - RNA, 21 nt, RNAi
ccaguacaucuacaugguauu

SEQ ID NO: 48583 - RNA, 21 nt, RNAi
uuggucauguagauguaccau

SEQ ID NO: 48584 - DNA, 21 bp, Homo sapiens
gaggcagttcacacaatccat

SEQ ID NO: 48585 - RNA, 21 nt, RNAi
ggcaguucacacaauccauuu

SEQ ID NO: 48586 - RNA, 21 nt, RNAi
uuccgucaaguguguuaggua

SEQ ID NO: 48587 - DNA, 21 bp, Homo sapiens
gattctcaggttggcacagtt

SEQ ID NO: 48588 - RNA, 21 nt, RNAi
uucucagguuggcacaguuuu

SEQ ID NO: 48589 - RNA, 21 nt, RNAi
uuaagaguccaaccgugucaa

SEQ ID NO: 48590 - DNA, 21 bp, Homo sapiens
taaattgattggtcgttacag

SEQ ID NO: 48591 - RNA, 21 nt, RNAi
aauugauuggucguuacaguu

SEQ ID NO: 48592 - RNA, 21 nt, RNAi
uuuuaacuaaccagcaauguc

SEQ ID NO: 48593 - DNA, 21 bp, Homo sapiens
tatcagcatctacggtattaa

SEQ ID NO: 48594 - RNA, 21 nt, RNAi
ucagcaucuacgguauuaauu

SEQ ID NO: 48595 - RNA, 21 nt, RNAi
uuagucguagaugccauaauu

SEQ ID NO: 48596 - DNA, 21 bp, Homo sapiens
tatggagagaacatgccacca

SEQ ID NO: 48597 - RNA, 21 nt, RNAi
uggagagaacaugccaccauu

SEQ ID NO: 48598 - RNA, 21 nt, RNAi
uuaccucucuuguacgguggu

SEQ ID NO: 48599 - DNA, 21 bp, Homo sapiens
taccggaattcattgagacaa

SEQ ID NO: 48600 - RNA, 21 nt, RNAi
ccggaauucauugagacaauu

SEQ ID NO: 48601 - RNA, 21 nt, RNAi
uuggccuuaaguaacucuguu

SEQ ID NO: 48602 - DNA, 21 bp, Homo sapiens
taatacagagcagaaacatac

SEQ ID NO: 48603 - RNA, 21 nt, RNAi
auacagagcagaaacauacuu

SEQ ID NO: 48604 - RNA, 21 nt, RNAi
uuuaugucucgucuuuguaug

SEQ ID NO: 48605 - DNA, 21 bp, Homo sapiens
tacagagcagaaacataccac

SEQ ID NO: 48606 - RNA, 21 nt, RNAi
cagagcagaaacauaccacuu

SEQ ID NO: 48607 - RNA, 21 nt, RNAi
uugucucgucuuuguauggug

SEQ ID NO: 48608 - DNA, 21 bp, Homo sapiens
taccttggatgattacatgag

SEQ ID NO: 48609 - RNA, 21 nt, RNAi
ccuuggaugauuacaugaguu

SEQ ID NO: 48610 - RNA, 21 nt, RNAi
uuggaaccuacuaauguacuc

SEQ ID NO: 48611 - DNA, 21 bp, Homo sapiens
tagaactccagttgtaaagaa

SEQ ID NO: 48612 - RNA, 21 nt, RNAi
gaacuccaguuguaaagaauu

SEQ ID NO: 48613 - RNA, 21 nt, RNAi
uucuugaggucaacauuucuu

SEQ ID NO: 48614 - DNA, 21 bp, Homo sapiens
tagttaccggaacgaaatagc

SEQ ID NO: 48615 - RNA, 21 nt, RNAi
guuaccggaacgaaauagcuu

SEQ ID NO: 48616 - RNA, 21 nt, RNAi
uucaauggccuugcuuuaucg

SEQ ID NO: 48617 - DNA, 21 bp, Homo sapiens
taccggaacgaaatagcttat

SEQ ID NO: 48618 - RNA, 21 nt, RNAi
ccggaacgaaauagcuuauuu

SEQ ID NO: 48619 - RNA, 21 nt, RNAi
uuggccuugcuuuaucgaaua

SEQ ID NO: 48620 - DNA, 21 bp, Homo sapiens
taagatcatccgactttatga

SEQ ID NO: 48621 - RNA, 21 nt, RNAi
agaucauccgacuuuaugauu

SEQ ID NO: 48622 - RNA, 21 nt, RNAi
uuucuaguaggcugaaauacu

SEQ ID NO: 48623 - DNA, 21 bp, Homo sapiens
tatgaaatcacggaccagtac

SEQ ID NO: 48624 - RNA, 21 nt, RNAi
ugaaaucacggaccaguacuu

SEQ ID NO: 48625 - RNA, 21 nt, RNAi
uuacuuuagugccuggucaug

SEQ ID NO: 48626 - DNA, 21 bp, Homo sapiens
tacatggtaatggagtgtgga

SEQ ID NO: 48627 - RNA, 21 nt, RNAi
caugguaauggaguguggauu

SEQ ID NO: 48628 - RNA, 21 nt, RNAi
uuguaccauuaccucacaccu

SEQ ID NO: 48629 - DNA, 21 bp, Homo sapiens
taatggagtgtggaaatattg

SEQ ID NO: 48630 - RNA, 21 nt, RNAi
auggaguguggaaauauuguu

SEQ ID NO: 48631 - RNA, 21 nt, RNAi
uuuaccucacaccuuuauaac

SEQ ID NO: 48632 - DNA, 21 bp, Homo sapiens
taaaccagctaactttctgat

SEQ ID NO: 48633 - RNA, 21 nt, RNAi
aaccagcuaacuuucugauuu

SEQ ID NO: 48634 - RNA, 21 nt, RNAi
uuuuggucgauugaaagacua

SEQ ID NO: 48635 - DNA, 21 bp, Homo sapiens
taactttctgatagttgatgg

SEQ ID NO: 48636 - RNA, 21 nt, RNAi
acuuucugauaguugaugguu

SEQ ID NO: 48637 - RNA, 21 nt, RNAi
uuugaaagacuaucaacuacc

SEQ ID NO: 48638 - DNA, 21 bp, Homo sapiens
taaagattctcaggttggcac

SEQ ID NO: 48639 - RNA, 21 nt, RNAi
aagauucucagguuggcacuu

SEQ ID NO: 48640 - RNA, 21 nt, RNAi
uuuucuaagaguccaaccgug
